(19) United States
(12) Patent Application Publication
(10) Pub. No.: US 2003/0148327 A1
(43) Pub. Date: Aug. 7, 2003

(54) Diagnosis of diseases associated with metastasis

(76) Inventors: Alexander Olek, Berlin (DE); Christian Piepenbrock, Berlin (DE); Kurt Berlin, Stahnsdorf (DE)

Correspondence Address: DAVIDSON, DAVIDSON & KAPPEL, LLC, 485 SEVENTH AVENUE, 14TH FLOOR, NEW YORK, NY, 10018, US

(21) Appl. No.: 10/240,485

(22) PCT Filed: Apr. 6, 2001
(86) PCT No.: PCT/EP01/03970

(30) Foreign Application Priority Data
Apr. 6, 2000 (DE) 10019058.8
Apr. 7, 2000 (DE) 10019173.8
Jun. 30, 2000 (DE) 100529.7
Sep. 1, 2000 (DE) 10043826.1

(51) Int. Cl. C12Q 1/68; C07H 21/04; C12P 19/34

(52) U.S. Cl. 435/6; 435/91.2; 536/24.3

(57) ABSTRACT

The present invention relates to the chemically modified genomic sequences of genes associated with metastasis, to oligonucleotides and/or PNA-oligomers for detecting the cytosine methylation state of genes associated with metastasis which are directed against the sequence, as well as to a method for ascertaining genetic and/or epigenetic parameters of genes associated with metastasis.

### FIELD OF THE INVENTION

[0001] The levels of observation that have been well studied by the methodological developments of recent years in molecular biology, are the genes themselves, the translation of these genes into RNA, and the resulting proteins. The question of which gene is switched on at which point in the course of the development of an individual, and how the activation and inhibition of specific genes in specific cells and tissues are controlled is correlatable to the degree and character of the methylation of the genes or of the genome. In this respect, pathogenic conditions may manifest themselves in a changed methylation pattern of individual genes or of the genome.

[0002] The present invention relates to nucleic acids, oligonucleotides, PNA-oligomers and to a method for the diagnosis and/or therapy of diseases which have a connection with the genetic and/or epigenetic parameters of genes associated with metastasis and, in particular, with the methylation status thereof.

### PRIOR ART

[0003] The key feature of malignant cells is their ability to invade normal healthy tissue and to be disseminated through the body to distant organs. This ability, known as metastasis, is one of the most fatal metastasis of cancer. In breast cancer for example, the extent of metastasis to the lymph nodes is a key prognostic factor of the disease. Approximately 30% of cancers are metastatic at the time of diagnosis, and a further 30-40% of the remaining case harbour occult metastases.

[0004] Metastasis is a highly complicated pathway involving multiple proteolytic enzymes, cell adhesion, deformability, cell receptors and motility. Cancer metastasis can be described in the following steps. The initial events involve establishment of the primary tumour. These comprise prise the initial transforming event and proliferation of the transformed cells followed by evasion of the immune mechanism and establishment of a nutritional supply.

[0005] From the primary tumour, metastasis proceeds by local invasion and destruction of extracellular matrix and parenchymal cells. It is hypothesised that destruction of the basement membrane proceeds in a two step manner. Firstly, the cancer cell attaches itself to the membrane, this is mediated by the binding of tumour cell surface proteins to glycoproteins, such as laminin, type IV collagen, and fibronectin. Invasion then proceeds by enzymatic means, both proteinases (serine, cysteine, aspartic proteinases and metalloproteinases) and tumour secreted hydrolytic enzymes (e.g. glycosidase, hyaluronidase and heparanase) have been implicated.

[0006] The next step involves the migration of tumour cells from the primary tumour. The movement of the cells through biological barriers may be driven by a number of factors. These include tumour-derived chemotactic factors, host-derived chemoattractants, and combinations of the two. Studies have shown that tumor cells respond chemotactically to growth factors, collagen, peptides, matrix components and proteolytic fragments of matrix components, adhesion proteins such as laminin and fibronectin, and tumour-derived attractants. Furthermore, the importance of autocrine growth factors for transformed cell motility has also been demonstrated.

[0007] The mobilised cells then attempt to penetrate blood vessel walls. Once the mobilised cells enter the blood stream they are embolized to distant organs. The cells may then be arrested in the lumen of small blood vessels or lymphatics. The cancer cells then proceed to extrude themselves through the walls of the vessels. Establishment of secondary tumours then proceeds by proliferation of the transformed cells followed by evasion of the immune mechanism and establishment of a nutritional supply.

[0008] The metastatic pathways involve the recruitment of enzymes used in many different normal pathways. Therefore the key difference between normal cells and malignant cancerous cells can be defined as one of gene regulation. DNA methylation has been implicated as a key regulatory mechanism in tumorigenesis, the role of methylation in tumorigenesis has been reviewed by Singal and Ginder ‘DNA Methylation’ Blood, Vol. 93 No. 12 (June 15), 1999: pp. 4059-4070. Examples of methylation linked oncogenesis include:

[0009] Head and neck cancer (Sanchez-Cespedes M et al. “Gene promoter hypermethylation in tumours and serum of head and neck cancer patients” Cancer Res. 2000 Feb. 15; 60 (4):892-5)

[0010] Hodgkin's disease (Garcia J F et al “Loss of p16 protein expression associated with methylation of the p16INK4A gene is a frequent finding in Hodgkin's disease” Lab invest 1999 December; 79 (12):1453-9)

[0011] Gastric cancer (Yanagisawa Y et al. “Methylation of the hMLH1 promoter in familial gastric cancer with microsatellite instability” Int J Cancer 2000 Jan. 1; 85 (1):50-3)

[0012] There is a continuing need to develop new methods of treatment and diagnosis of cancer. The identification of the methylation dependant regulation of cancer genes has opened up the possibility of creating alternative methods of cancer treatment and diagnosis. Treatment with DNA methylation inhibitors has been shown to restore gene expression of the key tumor suppressor genes and oncogenes gene p16, Bender et. al. “Inhibition of DNA methylation by 5-aza-2′-deoxycydine suppresses the growth of human tumor cell lines.” Cancer research 58; 95-101 (1998). This resulted in heritable levels of gene expression leading to suppression of growth in tumor cell lines.

[0013] Methylation based therapies could have considerable advantages over current methods of treatment, such as chemotherapy, surgery and radiotherapy. They may even provide a means of treating tumors which are resistant to conventional methods of therapy, as demonstrated by Soengas et al “Inactivation of the apoptosis effector Apaf-1 in malignant melanoma” Nature 409; 207-211(2001). In addition to the development of methylation specific therapies, experiments with Min mice have shown that inhibition of DNA methylation can suppress tumor initiation, Laird et. al. “Suppression of intestinal neoplasia by DNA hypomethylation” Cell 81; 197-205 (1995). Furthermore, DNA methylation analysis may provide novel means for cancer diagnosis.

[0014] The identification of methylation as a regulatory mechanism, and of the characterisation of the components of the metastatic cascade provides a novel basis for the development of therapies and diagnostics, through the methylation analysis of metastasis related genes.

[0015] 5-methylcytosine is the most frequent covalent base modification in the DNA of eukaryotic cells. It plays a role, for example, in the regulation of the transcription, in genetic imprinting, and in tumorigenesis. Therefore, the identification of 5-methylcytosine as a component of genetic information is of considerable interest. However, 5-methylcytosine positions cannot be identified by sequencing since 5-methylcytosine has the same base pairing behavior as cytosine. Moreover, the epigenetic information carried by 5-methylcytosine is completely lost during PCR amplification.

[0016] A relatively new and currently the most frequently used method for analyzing DNA for 5-methylcytosine is based upon the specific reaction of bisulfite with cytosine which, upon subsequent alkaline hydrolysis, is converted to uracil which corresponds to thymidine in its base pairing behavior. However, 5-methylcytosine remains unmodified under these conditions. Consequently, the original DNA is converted in such a manner that methylcytosine, which originally could not be distinguished from cytosine by its hybridization behavior, can now be detected as the only remaining cytosine using “normal” molecular biological techniques, for example, by amplification and hybridization or sequencing. All of these techniques are based on base pairing which can now be fully exploited. In terms of sensitivity, the prior art is defined by a method which encloses the DNA to be analyzed in an agarose matrix, thus preventing the diffusion and renaturation of the DNA (bisulfite only reacts with single-stranded DNA), and which replaces all precipitation and purification steps with fast dialysis (Olek A, Oswald J, Walter J. A modified and improved method for bisulphite based cytosine methylation analysis. Nucleic Acids Res. 1996 Dec. 15; 24(24):5064-6). Using this method, it is possible to analyze individual cells, which illustrates the potential of the method. However, currently only individual regions of a length of up to approximately 3000 base pairs are analyzed, a global analysis of cells for thousands of possible methylation events is not possible. However, this method cannot reliably analyze very small fragments from small sample quantities either. These are lost through the matrix in spite of the diffusion protection.

[0017] An overview of the further known methods of detecting 5-methylcytosine may be gathered from the following review article: Rein, T., DePamphilis, M. L., Zorbas, H., Nucleic Acids Res. 1998, 26, 2255.

[0018] To date, barring few exceptions (e.g., Zeschnigk M, Lich C, Buiting K, Doerfler W, Horsthemke B. A single-tube PCR test for the diagnosis of Angelman and Prader-Willi syndrome based on allelic methylation differences at the SNRPN locus. Eur J Hum Genet. 1997 March-April; 5(2):94-8) the bisulfite technique is only used in research. Always, however, short, specific fragments of a known gene are amplified subsequent to a bisulfite treatment and either completely sequenced (Olek A, Walter J. The pre-implantation ontogeny of the H19 methylation imprint. Nat Genet. 1997 November; 17(3):275-6) or individual cytosine positions are detected by a primer extension reaction (Gonzalgo M L, Jones P A. Rapid quantitation of methylation differences at specific sites using methylation-sensitive single nucleotide primer extension (Ms-SNuPE). Nucleic Acids Res. 1997 Jun. 15; 25(12):2529-31, WO 95/00669) or by enzymatic digestion (Xiong Z, Laird P W. COBRA: a sensitive and quantitative DNA methylation assay. Nucleic Acids Res. 1997 Jun. 15; 25(12):2532-4). In addition, detection by hybridization has also been described (Olek et al., WO 99/28498).

[0019] Further publications dealing with the use of the bisulfite technique for methylation detection in individual genes are: Grigg G, Clark S. Sequencing 5-methylcytosine residues in genomic DNA. Bioessays. 1994 June; 16(6):431-6, 431; Zeschnigk M, Schmitz B, Dittrich B, Buiting K, Horsthemke B, Doerfler W. Imprinted segments in the human genome: different DNA methylation patterns in the Prader-Willi/Angelman syndrome region as determined by the genomic sequencing method. Hum Mol Genet. 1997 March; 6(3):387-95; Feil R, Charlton J, Bird A P, Walter J, Reik W. Methylation analysis on individual chromosomes: improved protocol for bisulphite genomic sequencing. Nucleic Acids Res. 1994 Feb. 25; 22(4):695-6; Martin V, Ribieras S, Song-Wang X, Rio M C, Dante R. Genomic sequencing indicates a correlation between DNA hypomethylation in the 5′ region of the pS2 gene and its expression in human breast cancer cell lines. Gene. 1995 May 19; 157(1-2):261-4; WO 97 46705, WO 95 15373 and WO 97/45560.

[0020] An overview of the Prior Art in oligomer array manufacturing can be gathered from a special edition of Nature Genetics (Nature Genetics Supplement, Volume 21, January 1999), published in January 1999, and from the literature cited therein.

[0021] Fluorescently labeled probes are often used for the scanning of immobilized DNA arrays. The simple attachment of Cy3 and Cy5 dyes to the 5′-OH of the specific probe are particularly suitable for fluorescence labels. The detection of the fluorescence of the hybridized probes may be carried out, for example via a confocal microscope. Cy3 and Cy5 dyes, besides many others, are commercially available.

[0022] Matrix Assisted Laser Desorption Ionization Mass Spectrometry (MALDI-TOF) is a very efficient development for the analysis of biomolecules (Karas M, Hillenkamp F. Laser desorption ionization of proteins with molecular masses exceeding 10,000 daltons. Anal Chem. 1988 Oct. 15; 60(20):2299-301). An analyte is embedded in a light-absorbing matrix. The matrix is evaporated by a short laser pulse thus transporting the analyte molecule into the vapor phase in an unfragmented manner. The analyte is ionized by collisions with matrix molecules. An applied voltage accelerates the ions into a field-free flight tube. Due to their different masses, the ions are accelerated at different rates. Smaller ions reach the detector sooner than bigger ones.

[0023] MALDI-TOF spectrometry is excellently suited to the analysis of peptides and proteins. The analysis of nucleic acids is somewhat more difficult (Gut I G, Beck S. DNA and Matrix Assisted Laser Desorption Ionization Mass Spectrometry. Current Innovations and Future Trends. 1995, 1; 147-57). The sensitivity to nucleic acids is approximately 100 times worse than to peptides and decreases disproportionally with increasing fragment size. For nucleic acids having a multiply negatively charged backbone, the ionization process via the matrix is considerably less efficient. In MALDI-TOF spectrometry, the selection of the matrix plays an eminently important role. For the desorption of peptides, several very efficient matrixes have been found which produce a very fine crystallization. There are now several responsive matrixes for DNA, however, the difference in sensitivity has not been reduced. The difference in sensitivity can be reduced by chemically modifying the DNA in such a manner that it becomes more similar to a peptide. Phosphorothioate nucleic acids in which the usual phosphates of the backbone are substituted with thiophosphates can be converted into a chargeneutral neutral DNA using simple alkylation chemistry (Gut I G, Beck S. A procedure for selective DNA alkylation and detection by mass spectrometry. Nucleic Acids Res. 1995 Apr. 25; 23(8):1367-73). The coupling of a charge tag to this modified DNA results in an increase in sensitivity to the same level as that found for peptides. A further advantage of charge tagging is the increased stability of the analysis against impurities which make the detection of unmodified substrates considerably more difficult.

[0024] Genomic DNA is obtained from DNA of cell, tissue or other test samples using standard methods. This standard methodology is found in references such as Fritsch and Maniatis eds., Molecular Cloning: A Laboratory Manual, 1989.

### DESCRIPTION

[0025] The object of the present invention is to provide the chemically modified DNA of genes associated with metastasis, as well as oligonucleotides and/or PNA-oligomers for detecting cytosine methylations, as well as a method which is particularly suitable for the diagnosis and/or therapy of genetic and epigenetic parameters of genes associated with metastasis. The present invention is based on the discovery that genetic and epigenetic parameters and, in particular, the cytosine methylation pattern of genes associated with metastasis are particularly suitable for the diagnosis and/or therapy of diseases associated with metastasis.

[0026] This objective is achieved according to the present invention using a nucleic acid containing a sequence of at least 18 bases in length of the chemically pretreated DNA of genes associated with metastasis according to one of Seq. ID No.1 through Seq. ID No. 198 and sequences complementary thereto and/or of genes according to one of the sequences of the genes according to table 1 and sequences complementary thereto. In the table, after the listed gene designations, the respective data bank numbers (accession numbers) are specified which define the appertaining gene sequences as unique. GenBank was used as the underlying data bank, which is located at the National Institute of Health, interact address www.ncbi.nlm.nih.gov.

[0027] The chemically modified nucleic acid could heretofore not be connected with the ascertainment of genetic and epigenetic parameters.

[0028] The object of the present invention is further achieved by an oligonucleotide or oligomer for detecting the cytosine methylation state in chemically pretreated DNA, containing at least one base sequence having a length of at least 13 nucleotides which hybridizes to a chemically pretreated DNA of genes associated with metastasis according to Seq. ID No. 1 through Seq. ID No. 198 and sequences complementary thereto and/or of genes according to one of the sequences of the genes according to table 1 and sequences complementary thereto. The oligomer probes according to the present invention constitute important and effective tools which, for the first time, make it possible to ascertain the genetic and epigenetic parameters of genes associated with metastasis. The base sequence of the oligomers preferably contains at least one CpG dinucleotide. The probes may also exist in the form of a PNA (peptide nucleic acid) which has particularly preferred pairing properties. Particularly preferred are oligonucleotides according to the present invention in which the cytosine of the CpG dinucleotide is the 5^{th}-9^{th} nucleotide from the 5′-end of the 13-mer; in the case of PNA-oligomers, it is preferred for the cytosine of the CpG dinucleotide to be the 4^{th}-6^{th} nucleotide from the 5′-end of the 9-mer.

[0029] The oligomers according to the present invention are normally used in so called “sets” which contain at least one oligomer for each of the CpG dinucleotides of the sequences of Seq. ID No.1 through Seq. ID No. 198 and sequences complementary thereto and/or of genes according to one of the sequences of the genes according to table 1 and sequences complementary thereto. Preferred is a set which contains at least one oligomer for each of the CpG dinucleotides from one of Seq. ID No.1 through Seq. ID No. 198 and sequences complementary thereto and/or of genes according to one of the sequences of the genes according to table 1 and sequences complementary thereto.

[0030] Moreover, the present invention makes available a set of at least two oligonucleotides which can be used as so-called “primer oligonucleotides” for amplifying DNA sequences of one of Seq. ID No.1 through Seq. ID No. 198 and sequences complementary thereto and/or of genes according to one of the sequences of the genes according to table 1 and sequences complementary thereto, or segments thereof.

[0031] In the case of the sets of oligonucleotides according to the present invention, it is preferred that at least one oligonucleotide is bound to a solid phase.

[0032] The present invention moreover relates to a set of at least 10 n (oligonucleotides and/or PNA-oligomers) used for detecting the cytosine methylation state in chemically pretreated genomic DNA (Seq. ID No.1 through Seq. ID No. 198 and sequences complementary thereto and/or of genes according to one of the sequences of the genes according to table 1 and sequences complementry thereto). These probes enable diagnosis and/or therapy of genetic and epigenetic parameters of genes associated with metastasis. The set of oligomers may also be used for detecting single nucleotide polymorphisms (SNPs) in the chemically pretreated DNA of genes associated with metastasis according to one of Seq. ID No.1 through Seq. ID No. 198 and sequences complementary thereto of genes according to one of the sequences of the genes according to table 1 and sequences complementary thereto.

[0033] According to the present invention, it is preferred that an arrangement of different oligonucleotides- and/or PNA-oligomers (a so-called “array”) made available by the present invention is present in a manner that it is likewise bound to a solid phase. This array of different oligonucleotide- and/or PNA-oligomer sequences can be characterized in that it is arranged on the solid phase in the form of a rectangular or hexagonal lattice. The solid phase surface is preferably composed of silicon, glass, polystyrene, aluminium, steel, iron, copper, nickel, silver, or gold. However, nitrocellulose as well as plastics such as nylon which can exist in the form of pellets or also as resin matrices are possible as well.

[0034] Therefore, a further subject matter of the present invention is a method for manufacturing an array fixed to a carrier material for analysis in connection with diseases associated with metastasis in which method at least one oligomer according to the present invention is coupled to a solid phase. Methods for manufacturing such arrays are known, for example, from U.S. Pat. No. 5,744,305 by means of solid-phase chemistry and photolabile protecting groups.

[0035] A further subject matter of the present invention relates to a DNA chip for the analysis of disease associated with metastasis which contains at least one nucleic acid according to the present invention. DNA chips are known, for example, for U.S. Pat. No. 5,837,832.

[0036] Moreover, a subject matter of the present invention is a kit which may be composed, for example, of a bisulfite-containing reagent, a set of primer oligonucleotides containing at least two oligonucleotides whose sequences in each case correspond or are complementary to an 18 base long segment of the base sequences specified in the appendix (Seq. ID No. 1 through Seq. ID No. 198 and sequences complementary thereto and/or of genes according to one of the sequences of the genes according to table I and sequences complementary thereto), oligonucleotides and/or PNA-oligomers as well as instructions for carrying out and evaluating the described method. However, a kit along the lines of the present invention can also contain only part of the aforementioned components.

[0037] The present invention also makes available a method for ascertaining genetic and/or epigenetic netic parameters of genes associated with the cycle cell by analyzing cytosine methylations and single nucleotide polymorphisms, including the following steps:

[0038] In the first step of the method, a genomic DNA sample is chemically treated in such a manner that cytosine bases which are unmethylated at the 5′-position are converted to uracil, thymine, or another base which is dissimilar to cytosine in terms of hybridization behavior. This will be understood as ‘chemical pretreatmnent’ hereinafter.

[0039] The genomic DNA to be analyzed is preferably obtained form usual sources of DNA such as cells or cell components, for example, cell lines, biopsies, blood, sputum, stool, urine, cerebral-spinal spinal fluid, tissue embedded in paraffm such as tissue from eyes, intestine, kidney, brain, heart, prostate, lung, breast or liver, histologic object slides, or combinations thereof.

[0040] The above described treatment of genomic DNA is preferably carried out with bisulfite (hydroben sulfite, disulfite) and subsequent alkaline hydrolysis which results in a conversion of non-methylated cytosine nucleobases to uracil or to another base which is dissimilar to cytosine in terms of base pairing behavior.

[0041] Fragments of the chemically pretreated DNA are amplified, using sets of primer oligonucleotides according to the present invention, and a, preferably heat-stable polymerase. Because of statistical and practical considerations, preferably more than ten different fragments having a length of 100-2000 base pairs are amplified. The amplification of several DNA segments can be carried out simultaneously in one and the same reaction vessel. Usually, the amplification is carried out by means of a polymerase chain reaction (PCR).

[0042] In a preferred embodiment of the method, the set of primer oligonucleotides includes at least two olignonucleotides whose sequences are each reverse complementary or identical to an at least 18 base-pair long segment of the base sequences specified in the appendix (Seq. ID No. 1 through Seq. ID No. 198 and sequences complementary thereto and/or of genes according to one of the sequences of the genes according to table 1 and sequences complementary thereto). The primer oligonucleotides are preferably characterized in that they do not contain any CpG dinucleotides.

[0043] According to the present invention, it is preferred that at least one primer oligonucleotide is bonded to a solid phase during amplification. The different oligonucleotide and/or PNA oligomer sequences can be arranged on a plane solid phase in the form of a rectangular or hexagonal lattice, the solid phase surface preferably being composed of silicon, glass, polystyrene, aluminium, steel, iron, copper, nickel, silver, or gold, it being possible for other materials such as nitrocellulose or plastics to be used as well.

[0044] The fragments obtained by means of the amplification can carry a directly or indirectly detectable label. Preferred are labels in the form of fluorescence labels, radionuclides, or detachable molecule fragments having a typical mass which can be detected in a mass spectrometer, it being preferred that the fragments that are produced have a single positive or negative net charge for better detectability in the mass spectrometer. The detection may be carried out and visualized by means of matrix assisted laser desorption/ionization mass spectrometry (MALDI) or using electron spray mass spectrometry (ESI).

[0045] The amplificates obtained in the second step of the method are subsequently hybridized to an array or a set of oligonucleotides and/or PNA probes. In this context, the hybridization takes place in the manner described in the following. The set of probes used during the hybridization is preferably composed of at least 10 oligonucleotides or PNA-oligomers. In the process, the amplificates serve as probes which hybridize to oligonucleotides previously bonded to a solid phase. The non-hybridized fragments are subsequently removed. Said oligonucleotides contain at least one base sequence having a length of 13 nucleotides which is reverse complementary or identical to a segment of the base sequences specified in the appendix, the segment containing at least one CpG dinucleotide. The cytosine of the CpG dinucleotide is the 5^{th} to 9^{th} nucleotide from the 5′-end of the 13-mer. One oligonucleotide exists for each CpG dinucleotide. Said PNA-oligomers contain at least one base sequence having a length of 9 nucleotides which is reverse complementary or identical to a segment of the base sequences specified in the appendix, the segment containing at least one CpG dinucleotide. The cytosine of the CpG dinucleotide is the 4^{th} to 6^{th} nucleotide seen from the 5′-end of the 9-mer. One oligonucleotide exists for each CpG dinucleotide.

[0046] In the fourth step of the method, the non-hybridized amplificates are removed.

[0047] In the final step of the method, the hybridized amplificates are detected. In this context, it is preferred that labels attached to the amplificates are identifiable at each position of the solid phase at which an oligonucleotide sequence is located.

[0048] According to the present invention, it is preferred that the labels of the amplificates are fluorescence labels, radionuclides, or detachable molecule fragments having a typical mass which can be detected in a mass spectrometer. The mass spectrometer is preferred for the detection of the amplificates, fragments of the amplificates or of probes which are complementary to the amplificates, it being possible for the detection to be carried out and visualized by means of matrix assisted laser desorption/ionization mass spectrometry (MALDI) or using electron spray mass spectrometry (ESI).

[0049] The produced fragments may have a single positive or negative net charge for better detectability in the mass spectrometer. The aforementioned method is preferably used for ascertaining genetic and/or epigenetic parameters of genes associated with metastasis.

[0050] The oligomers according to the present invention or arrays thereof as well as a kit according to the present invention are intended to be used for the diagnosis and/or therapy of diseases associated with metastasis by analyzing methylation patterns of genes associated with metastasis. According to the present invention, the method is preferably used for the diagnosis and/or therapy of important genetic and/or epigenctic parameters within genes associated with metastasis.

[0051] The method according to the present invention is used, for example, for the diagnosis and/or therapy of solid tumours and cancer.

[0052] The nucleic acids according to the present invention of Seq. ID No. 1 through Seq. ID No. 198 and sequences complementary thereto and/or of genes according to one of the sequences of the genes according to table 1 and sequences complementary thereto can be used for the diagnosis and/or therapy of genetic and/or epigenetic parameters of genes associated with metastasis

[0053] The present invention moreover relates to a method for manufacturing a diagnostic agent and/or therapeutic agent for the diagnosis and/or therapy of diseases associated with metastasis by analyzing methylation patterns of genes associated with metastasis, the diagnostic agent and/or therapeutic agent being characterized in that at least one nucleic acid according to the present invention is used for manufacturing it, possibly together with suitable additives and auxiliary agents.

[0054] A further subject matter of the present invention relates to a diagnostic agent and/or therapeutic agent for diseases associated with metastasis by analyzing methylation patterns of genes associated with metastasis, the diagnostic agent and/or therapeutic agent containing at least one nucleic acid according to the present invention, possibly together with suitable additives and auxiliary agents.

[0055] The present invention moreover relates to the diagnosis and/or prognosis of events which are disadvantageous to patients or individuals in which important genetic and/or epigenetic parameters within genes associated with metastasis said parameters obtained by means of the present invention may be compared to another set of genetic and/or epigenetic parameters, the differences serving as the basis for a diagnosis and/or prognosis of events which are disadvantageous to patients or individuals.

[0056] In the context of the present invention the term “hybridization” is to be understood as a bond of an oligonucleotide to a completely complementary sequence along the lines of the WatsonCrick Crick base pairings in the sample DNA, forming a duplex structure. To be understood by “stringent hybridization conditions” are those conditions in which a hybridization is carried out at 60° C. in 2.5×SSC buffer, followed by several washing steps at 37° C. in a low buffer concentration, and remains stable.

[0057] The term “functional variants” denotes all DNA sequences which are complementary to a DNA sequence, and which hybridize to the reference sequence under stringent conditions and have an activity similar to the corresponding polypeptide according to the present invention.

[0058] In the context of the present invention, “genetic parameters” are mutations and polymorphisms of genes associated with metastasis and sequences further required for their regulation. To be designated as mutations are, in particular, insertions, deletions, point mutations, inversions and polymorphisms and, particularly preferred, SNPs (single nucleotide polymorphisms).

[0059] In the context of the present invention, “epigenetic parameters” are, in particular, cytosine methylations and further chemical modifications of DNA bases of genes associated with metastasis and sequences further required for their regulation. Further epigenetic parameters include, for example, the acetylation of histones which, however, cannot be directly analyzed using the described method but which, in turn, correlates with the DNA methylation.

[0060] In the following, the present invention will be explained in greater detail on the basis of the sequences and examples without being limited thereto.

### Sequence ID Nos. 1 to 198

[0061] Sequences having odd sequence numbers (e.g., Seq. ID No. 1, 3, 5, . . . ) exhibit in each case sequences of the chemically pretreated genomic DNAs of different genes associated with metastasis. Sequences having even sequence numbers (e.g., Seq. ID No. 2, 4, 6, . . . ) exhibit in each case the sequences of the chemically pretreated genomic DNAs of genes associated with metastasis which are complementary to the preceeding sequences (e.g., the complementary sequence to Seq. ID No.1 is Seq. ID No.2, the complementary sequence to Seq. ID No.3 is Seq. ID No.4, etc.)

### Sequence ID Nos. 199 to 202

[0062] Sequence ID Nos. 199 to 202 show the sequences of oligonucleotides used in Example 1.

[0063] The following example relates to a fragment of a gene associated with metastasis, in this case, CD22 in which a specific CG-position is analyzed for its methylation status.

### EXAMPLE 1

### Methylation analysis of the gene CD22 associated with metastasis.

[0064] The following example relates to a fragment of the gene CD22 in which a specific CG-position is to be analyzed for methylation.

[0065] In the first step, a genomic sequence is treated using bisulfite (hydrogen sulfite, disulfite) in such a manner that all cytosines which are not methylated at the 5-position of the base are modified in such a manner that a different base is substituted with regard to the base pairing behavior while the cytosines methylated at the 5-position remain unchanged.

[0066] If bisulfite solution is used for the reaction, then an addition takes place at the non-methylated cytosine bases. Moreover, a denaturating reagent or solvent as well as a radical interceptor must be present. A subsequent alkaline hydrolysis then gives rise to the conversion of nonmethylated cytosine nucleobases to uracil. The chemically converted DNA (sequence ID No. 159) is then used for the detection of methylated cytosines. In the second method step, the treated DNA sample is diluted with water or an aqueous solution. Preferably, the DNA is subsequently desulfonated (10-30 min, 90-100 ° C.) at an alkaline pH value. In the third step of the method, the DNA sample is amplified in a polymerase chain reaction, preferably using a heatresistant DNA polymerase. In the present case, cytosines of the gene CD22 are analyzed. To this end, a defined fragment having a length of 470 bp is amplified with the specific primer oligonucleotides TGTGTGTTGTTAAATGAAGA (Sequence ID No. 199) and ACACAAATATTAAAATTATC (Sequence ID No. 200). This amplificate serves as a sample which hybridizes to an oligonucleotide previously bonded to a solid phase, forming a duplex structure, for example TTGTTATACGTTTTGTTT (Sequence ID No. 201), the cytosine to be detected being located at position 210 of the amplificate. The detection of the hybridization product is based on Cy3 and Cy5 fluorescently labelled primer oligonucleotides which have been used for the amplification. A hybridization reaction of the amplified DNA with the oligonucleotide takes place only if a methylated cytosine was present at this location in the bisulfite-treated DNA. Thus, the methylation status of the specific cytosine to be analyzed is inferred from the hybridization product.

[0067] In order to verify the methylation status of the position, a sample of the amplificate is further hybridized to another oligonucleotide previously bonded to a solid phase. Said olignonucleotide is identical to the oligonucleotide previously used to analyze the methylation status of the sample, with the exception of the position in question. At the position to be analysed said oligonucleotide comprises a thymine base as opposed to a cytosine base i.e TTGTTATATGTTTTGTTT (Sequence ID No. 202). Therefore, the hybridisation reaction only takes place if an unmethylated cytosine was present at the position to be analysed.

### EXAMPLE 2

### Diagnosis of diseases associated with metastasis

[0068] In order to relate the methylation patterns to one of the diseases associated with metastasis, it is initially required to analyze the DNA methylation patterns of a group of diseased and of a group of healthy patients. These analyses are carried out, for example, analogously to Example 1. The results obtained in this manner are stored in a database and the CpG dinucleotides which are methylated differently between the two groups are identified. This can be carried out by determining individual CpG methylation rates as can be done, for example, in a relatively imprecise manner, by sequencing or else, in a very precise manner, by a methylation-sensitive “primer extension reaction”. It is also possible for the entire methylation status to be analyzed simultaneously, and for the patterns to be compared, for example, by clustering analyses which can be carried out, for example, by a computer.

[0069] Subsequently, it is possible to allocate the examined patients to a specific therapy group and to treat these patients selectively with an individualized therapy.

[0070] Example 2 can be carried out, for example, for cancer and solid tumours.

TABLE 1
List of preferred genes associated with metastasis according to the
invention

| | GenBank Entry No. |
|---|---|
| Gene | (http://www.ncbi.nim.nih.gov) |
| CD20 | L23418 |
| FN1 | M10905 |
| SDC2 | H04621 |
| ACTG1 | NM_001614 |
| CDH2 | NM_001792 |
| CDH4 | NM_001794 |
| CDW52 | NM_001803 |
| ITGAX | NM_000887 |
| UTGB1 | NM_002211 |
| ITGB5 | NM_002213 |
| ITGB7 | NM_000889 |
| NEO1 | NM_002499 |
| PCDH1 | NM_002587 |
| ENPP1 | NM_006208 |
| RTN1 | NM_021136 |
| SELPLG | NM_003006 |
| TM4SF2 | NM_004615 |
| ITGAE | NM_002208 |
| SPTB | NM_000347 |
| ITGB1 | NM_002211 |

1. A nucleic acid comprising a sequence at least 18 bases in length of a segment of the chemically pretreated DNA of genes associated with metastasis according to one of the sequences taken from the group of Seq. ID No. 1 to Seq. ID No. 198 and sequences complementary thereto.

2. A nucleic acid comprising a sequence at least 18 base pairs in length of the chemically pretreated DNA of genes associated with metastasis according to one of the sequences according to one of the genes CD20 (L23418), FN1 (M10905), SDC2 (J04621), ACTG1 (NM_{—}001614), CDH2 (NM_{—}001792), CDH4 (NM_{—}001794), CDW52 (NM_{—}001803), ITGAX (NM_{—}000887), NM_{—}002211, ITGB5 (NM_{—}002213), ITGB7 (NM_{—}000889), NEOI (NM_{—}002499), PCDH1 (NM_{—}002587), ENPPI (NM_{—}006208), RTNI (NM_{—}021136), SELPLG (NM_{—}003006), TM4sf2 (NM_{—}004615), ITGEA (NM_{—}002208), SPTB (NM_{—}000347), ITGB1 (NM_{—}002211) and sequences complementary thereto.

3. An oligomer, in particular an oligonucleotide or peptide nucleic acid (PNA)-oligomer, said oligomer comprising in each case at least one base sequence having a length of at least 9 nucleotides which hybridizes to or is identical to a chemically pretreated DNA of genes associated with metastasis according to one of the Seq ID Nos 1 to 198 according to claim 1 or to a chemically pretreated DNA of genes according to claim 2 and sequences complementary thereto.

4. The oligomer as recited in claim 3; wherein the base sequence includes at least one CpG dinucleotide.

5. The oligomer as recited in claim 3; characterized in that the cytosine of the CpG dinucleotide is located approximately in the middle third of the oligomer.

6. A set of oligomers, comprising at least two oligomers according to any of claims 3 to 5.

7. A set of oligomers as recited in claim 6, comprising oligomers for detecting the methylation state of all CpG dinucleotides within one of the sequences according to Seq. ID Nos. 1 through 198 according to claim 1 or a chemically pretreated DNA of genes according to claim 2, and sequences complementary thereto.

8. A set of at least two oligonucleotides as recited in claim 3, which can be used as primer oligonucleotides for the amplification of DNA sequences of one of Seq. ID No. 1 through Seq. ID No. 198 and sequences complementary thereto and/or sequences of a chemically pretreated DNA of genes according to claim 2, and sequences complementary thereto and segments thereof.

9. A set of oligonucleotides as recited in claim 8, characterized in that at least one oligonucleotide is bound to a solid phase.

10. Use of a set of oligomer probes comprising at least ten of the oligomers according to any of claims 6 through 9 for detecting the cytosine methylation state and/or single nucleotide polymorphisms (SNPs) in a chemically pretreated genomic DNA according to claim 1 or a chemically pretreated DNA of genes according to claim 2.

11. A method for manufacturing an arrangement of different oligomers (array) fixed to a carrier material for analyzing diseases associated with the methylation state of the CpG dinucleotides of one of the Seq. ID No. 1 through Seq. ID No. 198 and sequences complementary thereto and/or chemically pretreated DNA of genes according to claim 2, wherein at least one oligomer according to any of the claims 3 through 5 is coupled to a solid phase.

12. An arrangement of different oligomers (array) obtainable according to claim 11.

13. An array of different oligonucleotide- and/or PNA-oligomer sequences as recited in claim 12, characterized in that these are arranged on a plane solid phase in the form of a rectangular or hexagonal lattice.

14. The array as recited in any of the claims 12 or 13, characterized in that the solid phase surface is composed of silicon, glass, polystyrene, aluminium, steel, iron, copper, nickel, silver, or gold.

15. A DNA- and/or PNA-array for analyzing diseases associated with the methylation state of genes, comprising at least one nucleic acid according to one of the preceeding claims.

16. A method for ascertaining genetic and/or epigenetic parameters for the diagnosis and/or therapy of existing diseases or the predisposition to specific diseases by analyzing cytosine methylations, characterized in that the following steps are carried out:
a) in a genomic DNA sample, cytosine bases which are unmethylated at the 5-position are converted, by chemical treatment, to uracil or another base which is dissimilar to cytosine in terms of hybridization behavior;
b) fragments of the chemically pretreated genomic DNA are amplified using sets of primer oligonucleotides according to claim 8 or 9 and a polymerase, the amplificates carrying a detectable label;
c) Amplificates are hybridized to a set of oligonucleotides and/or PNA probes according to the claims 6 and 7, or else to an array according to one of the claims 12 through 15;
d) the hybridized amplificates are subsequently detected.

17. The method as recited in claim 16, characterized in that the chemical treatment is carried out by means of a solution of a bisulfite, hydrogen sulfite or disulfite.

18. The method as recited in one of the claims 16 or 17, characterized in that more than ten different fragments having a length of 100-2000 base pairs are amplified.

19. The method as recited in one of the claims 16 through 18, characterized in that the amplifiction of several DNA segments is carried out in one reaction vessel.

20. The method as recited in one of the claims 16 through 19, characterized in that the polymerase is a heat-resistant DNA polymerase.

21. The method as recited in claim 20, characterized in that the amplification is carried out by means of the polymerase chain reaction (PCR).

22. The method as recited in one of the claims 16 through 21, characterized in that the labels of the amplificates are fluorescence labels.

23. The method as recited in one of the claims 16 through 21, characterized in that the labels of the amplificates are radionuclides.

24. The method as recited in one of the claims 16 through 21, characterized in that the labels of the amplificates are detachable molecule fragments having a typical mass which are detected in a mass spectrometer.

25. The method as recited in one of the claims 16 through 21, characterized in that the amplificates or fragments of the amplificates are detected in the mass spectrometer.

26. The method as recited in one of the claims 24 and/or 25, characterized in that the produced fragments have a single positive or negative net charge for better detectability in the mass spectrometer

27. The method as recited in one of the claims 24 through 26, characterized in that detection is carried out and visualized by means of matrix assisted laser desorption/ionization mass spectrometry (MALDI) or using electron spray mass spectrometry (ESI).

28. The method as recited in one of the claims 16 through 27, characterized in that the genomic DNA is obtained from cells or cellular components which contain DNA, sources of DNA comprising, for example, cell lines, biopsies, blood, sputum, stool, urine, cerebral-spinal fluid, tissue embedded in paraffin such as tissue from eyes, intestine, kidney, brain, heart, prostate, lung, breast or liver, histologic object slides, and all possible combinations thereof.

29. A kit comprising a bisulfite (=disulfite, hydrogen sulfite) reagent as well as oligonucleotides and/or PNA-oligomers according to one of the claims 3 through 5.

30. The use of a nucleic acid according to claims 1 or 2, of an oligonucleotide or PNA-oligomer according to one of the claims 3 through 5, of a kit according to claim 29, of an array according to one of the claims 12 through 15, of a set of oligonucleotides according to one of claims 6 through 9 for the diagnosis of solid tumours and cancer.

31. The use of a nucleic acid according to claims 1 or 2, of an oligonucleotide or PNA-oligomer according to one of claims 3 through 5, of a kit according to claim 29, of an array according to one of the claims 12 through 15, of a set of oligonucleotides according to one of claims 6 through 9 for the therapy of solid tumours and cancer.

32. A kit, comprising a bisulfite (=disulfite, hydrogen sulfite) reagent as well as oligonucleotides tides and/or PNA-oligomers according to one of claims 3 through 5.

The application's sequence listing, which the Patent Office published only in electronic form, follows.

SEQUENCE LISTING (202 sequences)

SEQ ID NO: 1 - DNA, 6127 bp, Artificial Sequence
  chemically treated genomic DNA (Homo sapiens)
  unsure (1553)
gattgtggtggaagtattggtttttaataatttttatatttataaggattttttaaagggattaattatatattgggtaagtagttgtgtagtttagagtattggttggatttaatatattgagggtatgtggatttttaagaatgttatattttgtttgtgttagtaaattagagtgtttatttttgatattaaatttgatattattggtagatttttttttttattggaagggtgatatttagaagggagaatatttttttatgtattttgttttttttgtgattggggtgtttttatggttttttgttttttttttaaagttatgaaataatattggtaagttttaagaaaattagatttggattttattttgtttttttaattttgtgtgattttgtgtatatttttgatatgttataaatagtttgtgtttttgaatgtgtagtattaatttttagtggtgaaagttttaaaaggaaatagattgatttttttatgtataaatagttgggtagttgtggatggaattaattgttgatatatattggttgtgtttttttttttttgttattttttttgtagttgtgaaagtgaagtttggtttgaaaatatattttgttagtgtaaatttaaaaagtattaagataggatttttttattataataattaattggtaattttgaattgttagtttgaggggggagatgaggaagagttaagagatagtagtaggtgattgataattatatagatggttgaaaaaataaattatgttgttagattatgagaagagtatgttggaatggttaatttattatgtggtaagagtgattttataatttaataaaggtaagattaattaatagttttttattagggttttgagagaggatgttttaggttattttttaaaatattgaaatgtttaatattttagattgaattattgttttaatgtgagagagtagtttttggttagagtaatatgataatatgtattattaaaaataatatttttttggtgtttttttaaatttttttttattgtttattttaaattttatgtaaataattatatagttttttatatgtttattttatttaaattttaattttatgattataggaatttaattaaaaataatttttggttgtgtttttgaatatgcgtatatagaaaatagtattggttaaaattatttgaataagtattagatgtttgttaatagttttaataattgataaattattttagattttattaaagatatttgtatagtatttatatatattgtggaaaattttttaaaataaaatttttataaaattattgaaaaagtgggtgagtataaaattttttaaagtatggtatgtataataaataatttttttttttatatgtatattttaatattttattagagtaattttataaatttaaaataaattttattttgaagggaattattgttagttgataataaaacgtttttattgtttgtagagtatattttatattggggaaaaggttacgtggtttagagtaggnagatgttttgttttaggttagttgtgaatttagtgagtaaatatggattgagtgtttatagttgtgttagatttgggtttggtatgagagatatgaggggtttaaaataggtttggtttatgtttttttagagtttatatttttatgaaggatatgtatgttattagataattatatagtttggataacgtgttatgaaagaaaagtatttatatggtattatgagggtatgtgataggttaatgttacgtgtagataattaatgtttatagagagtttagagtatgtcgaggattgttttgagtattgtatatatataaattcgttagtttttattataattttgtgaagtaagtattttatattatttttattttttaaattttttttatttttatttattgtattattttaaatagtatataatagtatggtttttgaaatgtgatagatttggatttaaatttaatgtttttgttttttattttttaattattattattattatttttttgagatagagtttcgttttgttatttaggttggagtgtagtggtgtgatttcggtttattgtaagttttattttttaggtttatattatttttttgttttagttttttgagtagttgggattataggcgtttgttattacgtttggttaatttttttgtatttttaatagagatagagttttatcgtgttggttaggatggtttcgattttttgattttatgatttggtcgttttggttttttaaagtgttgggattataggtataagttatcgcgtttagtttagtttttattttttatgattttgatatgattgaagagtattggttagttgttttgtataatgatttttaatttaaggtagttaattgatttgatttagaggagtttggttttttgtagttttgttttgaaatggttgaatatattgaaatattgtagaaatattatttttatttatgaataataattttaggagttggatggttaagggattggatagaaatgtaatgattgggagtatttttaagtggttttgtgtttagagtatttgttttataggtatttatttttaaaaatttttttttaaaaatgtgtttttagatgtataatttatagaattataaatagttttttgtaatatttttagagagtttgaaaatgtttttatttttttgtagtgttgatattgatgtgttttaaatgggtagatattgggttatttgtaaagttttttatttaaattaagtagatagttgtaatattttatttgtgattggttaaagtttttttaatatttatattttttaaagtaaattgtgaattatttttatgaatatagaatttttttttttttgagatggagttttattttgttgtttaggttgtagtgtaatggcgtgattttagtttattgtaattttcgttttaggagtttaagtaatttttttgttttagtttttcgagtagttgtgattataggtatttattattacgtttaattaattttttgtatttttagtaaaggcggggttttattatgttggttaggttggtttcgaatttttgatttcgtgatttgtttttttggttttttaaagtgttgcgattatgggtatgagttattgtgtcggtttgaatatagaaatttttttgttttattttatcgtttagattggaatgtagtggtgtgattatggtttattgtagttttaattttttgggtttaaggaatttttttatttttattttttgagtagttaggattataggtgtatgttaatacgtttggtttttttttttttttttaatttattttgtagagatagggttttattatgttgtttaggttgatttggaatttttgggtttaagtgatttttttattttaattttttaatatgttgggattataagtatgagttattacgtttagtttaaattttatttaaaaaaaaaaaatataaaaatgtgatttattgtaagtattatttttaaaatattaatatgtaaagaaatatgtaataagttataatatttttttaaaaaaattaattttatttttttttttagtatatatttatttttaattaatattttttattttttttttttttcgttttttttttgattataatttagagtttttagggtattgttttttaagttgtgggttataatttattagtggattattaattaatttgattagcgtgtattaaaatgaagtagattaaaatagaaaatatcggaatatattatatagtaagggaaagtatgttattaatttattttagttatgtattttatatatttgtatgtgaatataatataaaatgtttgaaagttattattttggagtgttttatttatttgtgttttgaatttaatgttttttaaatatgtatgttggatagttgttgtataaatatttgtataagatttttaaaattaagaattttgtatatatatgatattttgtttttattttgtatggttaaaggttatattagagggaaatttttagtgtttataagttttataattattttttaaaaattcgttttttgtagtattttaaaagaatgttgtttaagattattttttttttaatgtaatttatattggtttgtattagtttttattattttgaaatatttagaaagtatgattttgtatatgtggtattaaaagtaggagttgggggttaggtatagaggtttatgtttgtaattttattattttgggaggttaaggtaggaggattattttagtttagttgggtatagtggtttatgtttataattttaatgttttgggaggtcgaggtgggtagattatgagattagtagttttagattagtatggttaatatggtgaaattttatttttatttaaaaaaatataaaaattagttgggtatggtggtacgcgtttgtagttttaattattcgggaggttgaggtaggagaattttttgaatttaggaggtggaggttgtattgagttaagattacgttattgtattttagtttgggtgatatagtgagattttattttaaaaaaaaaaaaaaaaaaaaaggtagttgatgatattaacgtaatttaattgaattatgagtttttgttagttttgaaaatattaattataaattaagtattataatttaagatttttttatatgaataaaaaattgttttaatatttttgagaagttattttttaaagtgtatttgttaattttgagggtaaaatgtaaaagttttgtttgatttatgtaaattttgaatttaatgaatttattatggatgtttttttttgtgtttattaatgtagataataagagtaatttatagatttaaaatatgagtttagatgttagttaaggcgtgattattattttttttttttttagtatgttttataaagagagatattttgatcgtattaatgaaaatgatttagaatatattagggagaggaatatgttttttgatttacgataagattttaatatgatggagtagaggaaacgagttatttagattttgtaaagttttgtgagttgaattagaaggttgtaatttttttttttttttggaaatgttagtataataaggtagaagtttttttaaattatttttaggttaaaagaggggtggaggaggagtggtgattagttgtttttagttttttaaaggagaaatggatatttaatttgtgtatttgatttgtagagttttaatgataatttagtattgtgtttggtgttttaaattttgtgtgttttttgggtatagtattttattaaaggaggatatttaatttagattgaatatgtaaagaaaagaaaggtatgatttaagttataggaattaataaataagttaggtatattttatgtacgtatttttttttttttttgggtattttgacgtttagagtggtatgagaagatttaaggtttttgaggaagtttgtgatttggtagtttagtattatatatgtttattgtaagtatacgtgattatatattaaattaattaaattaaaagtagattataggttaggtttagtggtttatagtgtaattttagtattttgggaagtcgaggtaggaggtttatttgagtataggagtttgaaattagtttaggtagtatagtgaatttttgtttttataaaaaaatttaaaaattaattgggtgtggtggtgtgtatatgtagttttatttatttttgggaggttgaggtaggaggattatttgagtttagaaggttaagattgttgtgagtcgtgattatgttattgtattttagtttgggtaatagagtgagattttatttaaaaaaaaaaaaaaaaaaatttaatttaagtggaaaaattttgtttgtatagtaatagttagattttgtgaattatatttaaatgatttgtttttttataaaattttagtggaaatgtattaatatatgatggaaaatgagagaatagtttgatttaaaatgtaaaatgaatttgtaattttttgtatgatgaagattatgtattttaagatag

SEQ ID NO: 2 - DNA, 6127 bp, Artificial Sequence
  chemically treated genomic DNA (Homo sapiens)
  unsure (4575)
ttgttttggggtgtatgatttttattatgtagaaagttataaatttattttgtattttaaattaagttgtttttttattttttattatgtattaatatatttttattaagattttgtaagaaaatagattatttgaatatgatttataaagtttgattattgttgtgtagataggatttttttatttgagttgaatttttttttttttttttttaggtaaggttttattttgttgtttaggttggaatgtagtggtatgattacggtttatagtagttttgattttttgggtttaagtgatttttttgttttagttttttaggagtagatgggattatatgtgtatattattatatttagttaatttttaaatttttttgtagagataaggatttattatgttgtttaggttggttttaaatttttgtgtttaagtgagttttttgtttcggttttttaaagtgttgggattatattgtgagttattgagtttggtttataatttatttttaatttagttaatttagtgtgtagttacgtgtgtttgtagtagatatatgtaatattaggttgttaaattatagatttttttaaaaattttaagtttttttatgttattttgagcgttaaggtatttaaaggaagaagaaaatacgtgtatgggatatatttaatttatttattggtttttatgatttgagttatgttttttttttttttatatatttagtttgaattgggtatttttttttaataaagtgttatatttagaaaatatataaaatttaaagtattaaatataatattaggttgttattaaggttttgtaaattaaatatataaattagatgtttattttttttttgaaagattggaagtaattggttattattttttttttattttttttttaatttgagggtagtttgagaaaatttttattttattatattaatatttttaaagagggagaaaaattatagttttttaatttaatttataggattttgtaggatttgagtaattcgttttttttgttttattatgttgaagttttgtcgtagattaggagatatgtttttttttttaatgtattttgggttatttttattgatgcggttaaaatatttttttttgtgaggtatgttgggaggaggaggagtggtaattacgttttggttggtatttgagtttatgttttaagtttgtggattatttttgttatttgtattaataaatataaagaaggatatttatgataaatttattaaatttaaaatttatatgggttaagtagaatttttatattttgtttttagagttaataggtgtattttaaaaagtagttttttaaaaatattagaataattttttatttatataaaaagattttagattataatgtttgatttgtaattgatatttttagagttaatagaaatttatggtttaattaaattacgttaatgttattaattgtttttttttttttttttttttttgagatggagttttattgtgttatttaggttggagtgtagtgacgtgattttggtttaatgtaatttttattttttgggtttaagagatttttttgttttagtttttcgagtagttgggattataggcgcgtgttattatgtttagttaatttttgtatttttttaagtagagatggggttttattatattgattatgttggtttggaattattgattttatggtttgtttatttcggttttttaaagtattgggattataggtatgagttattgtgtttagttgggttgaagtgatttttttgttttggttttttaaagtgataagattataggtatgagtttttgtgtttggtttttaatttttatttttaatattatatatgtaaagttatattttttaagtattttagagtaataggaattagtataaattagtatgaattatattagggaaaaaatagttttaaataatatttttttaaagtgttgtaaagaacgaatttttaaaaagtagttataaaatttgtgaatattaagggtttttttttgatgtagtttttggttatgtagaatagaaataaggtattatgtatatatagaatttttagttttaaaaattttatgtaaatatttatgtaataattatttaatatgtatgtttaaaaaatattaggtttaagatataaatagatgaaatattttagaatggtggtttttaaatattttatattgtatttatatataaatatataagatatataattgagataaattaatgatatatttttttttattatgtggtatatttcgatattttttattttaatttattttattttaatatacgttagttaaattgattgatgatttattaatgggttgtgatttataatttgaaaaataatgttttagaaattttaagttatggttaggaaggaaacggaagggagaaggggtaggaaatgttaattgagaatgaatatatgttagagaggagagtaagattgatttttttgaagaaatattgtagtttattatatatttttttatatattaatattttaaaaatagtatttatagtaaattatatttttgtattttttttttttaaatagagtttaagttgggcgtggtggtttatgtttataattttagtatgttgggagattgaggtgggaggattatttgagtttaggagttttagattaatttgggtaatatagtgaaattttgtttttataaaataaattaaaaaaaaaaaaaaaagttaggcgtgttggtatgtatttgtagttttagttatttaggaggtggaggtgggaggattttttgagtttaggaggttgaggttgtagtgagttatgattatattattgtattttagtttgggcgatggagtgaggtaaaaaagtttttgtatttaggtcggtatagtggtttatgtttataatcgtagtattttgggaggttaagggggtagattacgaggttaggagttcgagattagtttggttaatatagtgaaatttcgtttttattgaaaatataaaaaattagttgggcgtggtggtaggtgtttgtaattatagttattcgggaggttgaggtaggaaaattgtttgaatttttggagcggaagttgtagtgagttgagattacgttattgtattgtagtttgggtaatagagtgagattttattttaaaaaaaaaaaaattttgtatttatgaaaatagtttataatttgttttaagaaatatgggtgttaaaagaattttagttagttatagataaaatgttataattatttgtttagtttagatagaaggttttgtaaatagtttaatgtttatttatttaaaatatattaatgttagtattgtagaaagataaaaatatttttaagttttttgaggatattataaagggttgtttatgattttatgaattatatatttgaaagtatatttttgggggaggatttttgaaaataagtatttataaaatagatattttaaatatagagttatttaaaaatatttttaattattatatttttatttagttttttagttatttaatttttaggattattatttatagataagaataatatttttgtaatgttttagtatatttaattattttaaagtagaattatagaagattaggtttttttgaattaaattaattgattgttttaaattgaggattattgtataaaataattggttagtattttttaattatgttaaggttatgaaaaataaagattaggttgggcgcggtagtttatgtttgtaattttagtattttgggaggttaaggcggttagattatgaggttaggagatcgagattattttggttaatacggtgaaattttgtttttattaaaaatataaaaaaattagttaggcgtggtggtaggcgtttgtagttttagttatttaggaggttgaggtaggagaatggtgtgaatttgggaggtggagtttgtagtgagtcgagattatattattgtattttagtttgggtgatagagcgagattttgttttaaaaaaataataataataataattaaaaagtaaaaaataaaagtattggatttgaatttaggtttattatattttagaggttatattattatatgttgtttaagataatgtaataagtagaagtggggggaatttaaaaaataaaaataatatgaagtatttattttatagagttgtaatgagaattaacgagtttgtgtatgtgtagtgtttaaaatagttttcggtatattttaagttttttatggatattagttgtttatacgtgatattagtttgttatatatttttatggtgttatataggtattttttttttatagtacgttatttaggttgtgtgattatttgatggtatatatgttttttatgagagtataagttttagaaagatatgaattaggtttgttttggattttttatgttttttatgttaagtttaggtttagtatagttgtgggtatttagtttatatttgtttattggatttatagttagtttagagtaaagtatttntttgttttggattacgtggttttttttttagtatagagtatattttataaataataaaaacgttttattattaattagtaatagttttttttaaaataagatttattttgaatttatggagttgttttggtagaatattgaaatgtatatgtaaaaaagaaaattatttattatgtatattatattttaaaaaattttatatttatttatttttttaataattttgtaggaattttattttaaaaagttttttatagtatgtataaatattgtataaatatttttaataggatttaaaataatttattagttattgaaattattaataaatatttgatatttatttaagtgattttaattaatattgttttttgtatacgtatatttagaaatataattaagagttatttttaattgaatttttataattataaaattaaagtttgagtaaaataagtatataaaaaattatgtaattgtttatatagaatttaaaatgaataatggaaaaggatttgagagaatattaggaaaatattatttttaatgatgtatgttgttatgttattttagttaagagttatttttttatattggaataataatttagtttggagtattgaatattttaatattttgagagatggtttagaatatttttttttaggattttagtgaggggttgttgattgattttgtttttgttggattatgaggttatttttgttatatgataaattaattattttaatatattttttttatagtttaatagtatgatttatttttttaattatttatgtaattattaattatttgttgttattttttggtttttttttatttttttttttaaattaataatttaaagttattagttggttattatagtagaagaattttgttttgatattttttggatttgtattggtagaatgtgtttttaagttaaattttatttttatagttgtaaaggaaatgataagagaagaaaaatatagttaatatatattagtaattaattttatttataattgtttagttgtttgtgtatggaagaattagtttgtttttttttggggtttttattattgaaaattgatattgtatatttagagatataagttgtttgtaatatgttaggaatgtgtataagattatatagagttgaagagataaaatgaaatttagatttagtttttttgggatttgttagtattattttatagttttaaaaaaaaaataaaaaattataaaaatattttaattatagagagagtaaaatatatgaaaaaatatttttttttttgaatattatttttttaataaaggagaaaatttgttaatgatattagatttagtattaagaatagatattttgatttattggtatagataaggtgtgatatttttaggaatttatatgtttttagtatgttaaatttagttaatattttggattatatagttatttgtttaatgtgtagttagtttttttaaaaaatttttataaatgtgaaagttgttgggaattaatgtttttattataatt

SEQ ID NO: 3 - DNA, 6137 bp, Artificial Sequence
  chemically treated genomic DNA (Homo sapiens)
tatttataaattatgagtttttaatatattgagagtttttgaaatttatttaatatagtgtaagttttatagttaaatagcgtagttaaattttttttttattttttatgtttgagataggaaggaaaatgattaagtggatttttagtttaattgaaatagttatgtatttttttttgtatttagattgaatattttgtgaaataagaatataatgtttattatagattttgaaagtttttatttttttgagttttagtgatatgtttttattagttggtattattgaaaaggtgagttgtagaattgtattaatttattgatagatgatattgttaataattgaaattaaataataaaatttaatggatttgggaagagatatatttagaggttttttatgtgtatttaatataataattttggaaattatttatttaaaaataatttggagtttagaataaaatagaattttatattatatagatgtaatttttgtgtttttttaagattgtgtttttttttagatttaatataaattttatttaggtttttattttaatttttgttattagtatattagtttaagttttagtttgattatttagaatttttattaattaggtttttgtgtttagtatgggttattttgttttattttaattgatggtatataattttagtatagttttttttttgtagattgtttttttattttatattttatagttattattttgttgattaggatttgatttattttttttgttttttttaaattttagtttgtttagattaattattgaagatttaatggaaattttttttatttttttatattatgaatttttgtaagatggtttgaaggtttatattttattaggtattttttttattatttattatttatttataaaaatttattaagtgtttaatttatttttaagtatggttgaatatgtatttatcgtaggtgacgtttgaaggagagaagagtgaattatatttgttgtatgttttggaattgtatataattttgtttaaggagtaggaaggtaaataaaatataatggtatatagtggtaggaataaatgtttttagtttttaaaattatttttgttgaaattttatttttagtggaaattttggcggtgttaattaggggagaaaaattatttttattttttaaaggtatatataattgattcggttatgttgttatatattgatgggattaatattttagtatagggaaggggttttggtttgagttttgggaattttgagtttttattttaatagatcgtaagtaggaaatttgttttcggtattatgttattgtttttgagtatattattttgattgatgatgaatttttttatatttaaaatataaagttttttttatgttttaggtaacgtgaaattttttttttttggataaatgttatttattttttttttttagtaagatgtatttttatgattttttgatgtatgattaaattatataataaatattattggaatattatgtatttttaattgtaataaaagtgattgtgatttatatgtagttggaaatatttttttttttaagaattaggtaagatggatttaattttatattgattagattttgaaagattaattcgattatattattttgtggagtttatatttttatgtttatttttaattttgagtttttgtttatgttatattattttagtttagaagtggttttgttattttatatgtattgtatttggtttacgtagatagggtgcgttgttttattaataaatttttttaatgaaaatgtgtgtgaaaggatgagagaatttatgtttaaattaatcgttttattaaaaaaattatatatttattgttacgtatttttgataagtaaagtggatagtgatgagtaaagtagataggaatttagtttaagaattagaatgtttgggtagaattttggttttattattgttatgaattattgtgtgattttggaaaagttgtttcgagtttttgggttttagtttttttatgagtaaaatgaggatgaaaatagtaatttttttaataaatttttatgaggggaatatatttattaatttatataaattgtttagaatattttaatatgtaagtgttgttaattaatagatttaaagatttttgaatatttttaaatttatgttttgtattgttgttttcgtttttatttttaggttaaatttttatttttatggttattattttgtttaatatagagtcgttttattatttttttttaatgattaatagtttttggagttattagtttaagtggtttattaaggtatttttttaaattaggatatatttttttttaaaaataattttggaagtagtggattatatatttaaatatatattatatatatgtttatatatatatgtatgtgtttgtgtataagtataatatgtatatatttgtatagttagttgtttttagaattttacgtgtgtgtttgtgtgtttgattttatttgatttttatagtaattttatgaggttagtattattattattttttataagaaaggagattgaagtttaaagaggttaagtgagttgattaagattatatagttagtgttagagtttaaattagttttttttttgtaaatttatttttaagtaattatgttgtattaatttttatcgtaaaatagaggagattagatagagcgttcgcggatttaggttaaatatattgttaggtcgatttattttaatatattttatttataattatagtgaaaaagaaaataattttttaaagtaattttataggagtttatggaaatgttagtattttagttaagtttagtttaaggaatatagagttaaaaggtatttgttttttagcgatagtttttttgttgatttataagatgtaaatgaaatgttaatgtttaaattaagtgggagaaattatttattttgagaggaaaaaaatatggtataaaagttttattttagaatattgttaatgtaaggagaattggaagaataggataagtaggtttttgagaaaaattatagttgaagatagggtttaatagtttagagtattaaaagataaataattttaaaaattagtgtgtgagtgtgtgtgtgtgtgtgtgtgtttgtgtgttgcgagtttttaatttcgttggtaattcgtagttttttgatgaaagtgtagtatgtaacgattattagttggtattttttgttggagattagttttataaaagggtgattttgtgatgtacgaaaggttatttaatgttttagcgaagtgttttagggattaagattttattattttttggtgatgagagttgtgattttgtatttttgatttagagttatttagggtttcgatagttttatttcggtgttttagaggaaaatttttttttatgttttttgtttgatttgaaagtaatatagtttttcgatgttttttttgggaggtggtttaatttttagaaattgtttaagaagtttgtttatttgttggagtgtttggttttcgggaacggattaagacggatttggtttttaatttgaaataatttgaggattttttgtttataatttaaaattatcgtttaatttaaagtaaaaaagtgatacgttttttagagggtttttgtagatattgggaaaattcgtatgacgaagtacggtttagaaatttcggatttaatttttttcgggaaaagtaaatattttttgttggtatcgggtagtcgatttacgtagtttttttttaaaattaagtttatgttagtcgggtgtgaggggagtggtgggggtgagtagggggaggagagagattcgaaaagtataggaggaattagtttagtataggggttgtttttgttaataagtagttatttttgttaatttttaagaagtaagtttttatttttgttatttttttttgtttttttttttttttttttttttattttcgtttttggatttaaggttcgttttttatcgttatcgttttgttttattattttttttataggatagaaggttgtagtagtacggcggagaaaaatttttgaggaatgagttagtgggatgggcgtatgggtggagggagagggtagtcgatttttaaattttagcgagggtgggtgggtagttggaagttagaggttttattattggggcgttgtaatattatagaaagtgttagttttagggttttttttggcgcgcgcggtttttgtgtttgttttttattggcggatttggttttgggggcggagtcgcggtgaagtatcgtttattcgggttttaggatcggggtacgcggttttttttgatttcggagttgggtttagggttcggatttagttttgtagcgtttttaggttgcggattcgcgttttaattatttgttttgcgttgcgttcggggaagtggggaggagacgggagggagggaggaggcggggagaggaggaaagaggtagtttatatacgttttttagtttttttatttagagtagttcggagatcgttgtcgtcgttgtcgttgttattatcgttgttatttgaggagattcgtcgttttttcgtcgtcgttttttgcgagttttttttagtatttggcgttttatgtatattgttattgttattattattattattttaatataaggaaaataaaagaagatattagcgaaaagaatcgtttatattttttcgaattatttaagtgttttttggaaatagagggtcgttgttttcggaggagtagtcgaagggttcgtgggttggtgttgatcgggagggaggaggagttgggggtattgcgtggtggaaagttgcgtgcggtagagaatcgaaggtgtagcgttatagtttaggggacggtgtgtttgggagaagacgttgtttttgcgtcgggattcgttagcgcgcgggtatcgcggggttcgggacgacgtttttttttgcggcgtggatttcgttagtggtttattaagaaggaggaggaatatggaatttaagggggttagtttttgtcgtttgtttttttgttttttgattttcgttatcgtttttaggttaggtgagtaagggtttgggagtagttttagatagacgtgggtttggagtagttttttaggttttcgttttagtttcgtattttcgaggtagtgcgtttaggcgcgtggtggaggtaaggggatcgttgttttggtatagagttgttttcgggttcggttatttgtgtcgtacgtttgggtttggttggttagtttaagtttgggtattaagttggggaaattgggtgaatttttaggaatttggtgtttcggggtgggtaggattcgtttgacgttttttttttgtttttgcggtttttagttaggcggcggatttttgttttttgatagttttttttgtttttgggtatttaagtttacgttattgcgtttcgagtagtttttttttcgtttagttttcggatgaaataattgtcggtattttttcgtgataaattttttagtaatttttttttggtgagtcgaggaagggatgggaggggtagagaaggagaggattttaattattttttttcgttttttttgcgaaatttgttaaagtttaaaatcgtggttttaacgttattttttgcggttttcgtttattgtttgggcgggtggtgagtgaaagggtgatcgtaggtagataatatagttagaataggaattagtaggtaggtttgggagatattttagtgagaggtttgtgaatttttaggatttgtttatagagttttagtttttagttttgtattgagttttggaagagagagagagatatagagagagagagagagagagagagaaaaggtaaaatttttaataattaaaatatttttcgggaaatttttttttatattttcggggacgttttttggttttggtatttttaggttcgtttggcggttgatataagttgttttaatagggtatttcgtgcgtttatagttgtttgatagagtagtaggtttttttgtttttttaaattgaaaatttaggggatttttttttttttgaagttttt

SEQ ID NO: 4 - DNA, 6137 bp, Artificial Sequence
  chemically treated genomic DNA (Homo sapiens)
aaaaattttaaagaaaaaaaaattttttaaatttttagtttaggggagtaaaggaatttgttgttttgttaggtaattgtgagcgtacggaatattttgttagaataatttgtgttagtcgttaggcgggtttgaggatattagggttaggggacgttttcgagggtgtggaaagggatttttcgagagatattttagttgttgggaattttgttttttttttttttttttttttttttttttatattttttttttttttttaagatttagtatagaattgagaattgaggttttatgagtaggttttggaaatttataaattttttattgaggtgttttttaggtttatttattaatttttgttttggttgtgttatttgtttgcggttatttttttatttattattcgtttagataatggacggggatcgtagggggtaacgttgaaattacgattttaagttttagtaggtttcgtaaggggggcggggggaggtgattaaagttttttttttttttattttttttatttttttttcggtttattaaggggaagttattaggggatttattacgaaaaagtgtcggtagttattttattcgagaattaagcgaaagaaaaattgttcggggcgtagtgacgtggatttggatatttagagataggaggaattgttagagggtaagagttcgtcgtttagttgggagtcgtagggataaggggagagcgttaggcgaattttgtttatttcggagtattaagtttttggagatttatttagtttttttagtttgatgtttaaatttgagttaattagttaagtttaaacgtgcggtataggtgatcgagttcggggatagttttgtgttaggatagcggtttttttatttttattacgcgtttgggcgtattgtttcgggggtgcgaggttgggacggggatttaggaaattgttttaggtttacgtttgtttggggttgtttttaggtttttgtttatttggtttgaagacggtggcggagattaagaggtagaagagtagacggtaggaattggtttttttggattttatatttttttttttttttggtgggttattgacggagtttacgtcgtaggagggggcgtcgtttcgggtttcgcggtgttcgcgcgttggcgggtttcgacgtaggggtagcgtttttttttagatatatcgttttttgggttgtggcgttgtattttcggttttttgtcgtacgtaattttttattacgtaatgtttttaattttttttttttttcggttaatattagtttacgggtttttcggttgttttttcggggataacgattttttgtttttaggagatatttgagtaattcggaaaggtgtaagcggtttttttcgttggtatttttttttattttttttgtattggaatgataataataatggtagtggtaatgtgtatgaaacgttaggtgttaagaaggattcgtaggaggcggcgacgggggggcggcgggtttttttaggtggtagcggtggtagtagcggtagcggcggtagcggttttcgggttgttttgagtagagggattggaaggcgtgtgtaagttgttttttttttttttttttcgttttttttttttttttcgttttttttttattttttcggacgtagcgtaaagtaggtggttgaagcgcggattcgtagtttagaggcgttgtaggattgagttcgagttttgagtttagtttcgggattagggagaatcgcgtgtttcggttttggagttcggatgagcggtgttttatcgcggtttcgtttttagggttaggttcgttaataagaagtaagtataggagtcgcgcgcgttagggagagttttgggattaatattttttgtgatgttgtagcgttttagtgataaggtttttggtttttaattgtttatttattttcgttgaggtttaaaaatcgattgttttttttttttatttatacgtttattttattgatttattttttagagattttttttcgtcgtgttgttgtagttttttgttttgtaaagagaatagtggggtagggcggtggcggtggggagcgaattttgggtttaagagcgggagtgaagggaaaaggaaaggaaagggtaggaggaagtggtaaaggtggaaatttgttttttgggagttaataggaatagttatttgttggtaggggtaatttttgtattggattgattttttttgtatttttcgaattttttttttttttttgtttatttttattattttttttatattcggttggtatagatttggttttaaaggaagattacgtgagtcgattgttcggtattaatagaagatatttgtttttttcgggggaaattaaattcggaatttttaaatcgtatttcgttatacggatttttttaatgtttataaaagttttttagagagcgtgttatttttttattttgagttaagcggtgattttaagttatagatagaaaatttttaaattattttagattaaaagttaagttcgttttggttcgttttcgaaagttaggtattttagtagatggataggttttttaggtaatttttaaagattgaattattttttaggaggaatatcgggaagttgtgttgtttttaaattaggtagagagtatgaaggaagatttttttttagaatatcggggtggagttgtcggagttttaagtggttttaaattagggatgtaggattataatttttattattaaagaataataaaattttggtttttgaagtatttcgttggggtattaaatagtttttcgtgtattatagggttatttttttgtgagattggtttttagtagaggatgttaattagtaatcgttatatattgtatttttattagaaaattgcgagttattagcgagattggagattcgtaatatatagatatatatatatatatatatatttatatattgatttttaaaattgtttattttttagtgttttaaattattaagttttatttttagttgtgattttttttaaaagtttgtttgttttgtttttttagttttttttatattaataatattttagagtagagtttttatattatatttttttttttttaaaataagtagttttttttatttggtttaaatattaatattttatttgtattttatgaattaataggaaggttatcgttaggaggtaaatgttttttaattttatattttttgagttaagtttggttgaaatgttagtatttttatggatttttgtagaattgttttagggaattgtttttttttttattgtggttgtaagtggggtgtattagaataaatcgatttgataatatatttaatttaggttcgcgaacgttttatttgattttttttattttacgatgggagttaatatagtataattgtttaaaggtagatttgtaaaaggaagattgatttgggttttgatattaattgtatgattttggttaatttatttaatttttttaagttttagtttttttttttgtaaaaagtgataatagtgttagttttatgggattgttgtgaagattaaatgagattaaatatataaatatatacgtggaattttgggagtaattgattatataaatatgtatatattatatttatatataaatatatgtatatatatatgggtatatgtataatatatatttgaatgtgtagtttattgtttttagaattgtttttagaaaggaatgtgttttagtttaggaaaatgttttgataagttatttggattagtaattttaaaggttattggttattaaaaaaaaatggtgaaacggttttatattaaataaaataataattatgaaaatagaaatttggtttgggagtggggacgaaggtaataatataaagtatgagtttagaaatgtttaaaggtttttagatttattaattagtaatatttatatgttagaatattttaagtaatttatatgaattaatagatgtattttttttataaaaatttattgaaggagttgttatttttatttttattttatttatgaagaaattgaaatttagagattcgaagtaatttttttaaggttatataatgatttatagtaatggtaaagttagggttttatttaggtattttgatttttgaattgaatttttatttattttgtttattattatttattttgtttattaagaatgcgtagtaataaatgtatggtttttttggtggggcgattgatttaaatataagtttttttatttttttatatatatttttattaaggaaatttattaataaagtagcgtattttatttgcgtaggttagatatagtgtatatgagatgataagattatttttaaattgaaataatgtagtataagtaagagtttagagttagaaataaatataaaaatgtaagttttataaagtaatgtaatcgaattaattttttaaaatttagttaatgtgggattggatttattttatttaatttttgagaggaagagtgtttttagttatatgtagattatagttatttttgttataattgagaatatatagtattttaataatatttattgtatagtttagttatgtattagagaattataagggtatattttgttgaaagggaaaaatgaataatatttatttagggggaaaaaattttacgttatttgggatatgagaagagttttgtattttaagtataaaggaatttattattaattaggatgatatgtttaaaagtagtgatatggtatcggaggtaagttttttatttacggtttgttgagataaggatttaggatttttaaggtttaggttaggattttttttttgtattaaaatattaattttattagtatgtgataatatagtcgagttaattgtgtgtgtttttgaagaatggaagtagttttttttttttgattagtatcgttaaaatttttattggagatgaaattttaataaagatagttttggaagttgagaatatttgtttttattattgtatattattgtgttttgtttgtttttttattttttgaataaaattgtatgtagttttagagtatgtaataaatatgatttattttttttttttttaagcgttatttacggtgaatgtatgtttagttatatttaaaaatagattggatatttgataaatttttgtgaatggatgataagtggtgagaaaaatatttaatggaatataagtttttaaattattttataagggtttatgatatgagaagatgaaaggggtttttattgggtttttaatgattggtttaggtagattaaggtttaggaaaggtaaaaagaatgagttaagttttagttaataaggtgataattatgaagtataaagtgaggaaataatttatagaagaaaggttgtattaaaattatatgttattaattagaataaaataaagtggtttatgttgagtatagaaatttgattagtaaaggttttaggtgattaagttagggtttaggttaatatattgatgataaagattgaaataagggtttaagtgggatttatattaagtttaggaagaaatataattttaaagaggtatagagattatatttgtataatataaaattttgttttattttagattttaagttgtttttaagtaaatgatttttaaagttattgtattaaatatatatggaggatttttgggtatatttttttttaagtttattgaattttattgtttaattttagttgttaatagtattatttgttaatgaattaatataattttgtaatttatttttttaataatgttagttaataaagatatattattgaagtttaggagagtaaaaatttttaaagtttatgataaatattatgtttttattttatagaatgtttagtttgggtataaaaagaaatatatagttattttagttgaattagaaatttatttagttatttttttttttgttttagatatgaggaatgaagaaagaatttagttacgttatttgattatgaaatttatattatattaaatgaattttaaaaatttttagtgtattaaaaatttataatttgtgggtg

SEQ ID NO: 5 - DNA, 6111 bp, Artificial Sequence
  chemically treated genomic DNA (Homo sapiens)
ttttaataatattaagatttattgcggataatattaaaatttattataaaatgtattattagttgtagtagtaatgaagatagtatgatattagtattgagatagatttataggttaatggattataggagagagtttttttttttaataaatttatgtatgtggagatttaataaacgatgaatatgatatagtttagttgggagaggatgggttaattaatggtgtagggatattttattatttatatagtaaaaattagaatttaatttatattatatataaaataagttaagtggatttaaagatttaaatatgagaagtaaaattataggtcgggcgtggtggtttatgtttgtaattttagtattttgggaggttaaggtgggtagattatttgaaattaggagtttgagattagtttgattaacgtggtgatattttgtttttattaaaaatataaatattagttaggcgtggtggtgagtgtttgtagttttagttattcgggaggtcgaggtaggagaattgttggaattcgggaggcggaggttgtagtgagttgagatggtgttattgtattttagtttgggcgatagagtaagattttattttaaaaataaaaaataaaataaaataaaataaaaattttataaaataaatataatatagaaaaaattgtataagtttagggtagaagtggattttttaagataaaagaaatataaattataaagaaaatgattaatatatttgatatattaaaatttatattagttcgttaaaagatattattttaaaaagtgtaaagaattatatattgggaggagatatttttaatgtatataattgaaaaatgattcgtatttagattgtagagaatttttttatttcgataagaaaaagataaataatataatagaaaaatgggtaaagggtttgaatagtaattttatagaagaggaaaagtaaatggtttataaatatgtgaaaagatgtttaattttattagtaattatggaaatgtaaataaaaagtattatattatattattttatattaattagattgataaaaatattaaagtttgataatattaaatgttgttgaatttgtagggtaattatataattttgttgttgatagtgtaaattggaagagttaattttaaaaataagttagtgttatttaataagattgaagatatatgtacggtaaaatttagtaatttttttgttagtatatatattagaaagattttatatacgtgtattgggaagtttttataagaatgtttatagtaataatgttttaataggaaaaagttgaaaatagtttaaattgtattagtagtaaaatggataaatatttgtggttttagtaatttaggaggttgaggtaggaggattgtttgagtttaggagtttaaggttgtagtgaatcgtgatggggttattgtattataagtttgggtgatagaatgagattttatttggaaaataaataaatattgtgtattatttgtttataatgggatattatatagtagtgaaaaggaataaatgaattttggttgaattttaggaatatgacgttgtagtaaaaatgtaagtagtagaagaatttatatagtataataattttatttatttatagtttaaaaatatggtaaaattaaataagatattgtttaaagatataattataaggtgaaatttcgtttttattaaaaatataaaaattagttgggtatggtggcgtgtgtttgtagttttagttattcgggaggatgaggtaggaggatggtttgaatttgggaggtagagtcgagattacgttattgtattttagtttggtgatagagcgagatgtcgttttaaaaaataaataaataaaaattatataattataagtggaaaaattatagagagaaataagggatgataaatataaaatttaggataatgtttttatttttgttggggaggggagtagggtatgaggtcgatggaattttatgaaagattggggtattggaatttagagtttttttgttagttgggttatgggtatatgatattattagtttattatttttttgttgttttttagatgggtatagatatagatggggaacgtatattgtttaattgtgaattgaattaaagcgttaatttaatgtaaaatggtttatatggtttttagattttagatttaaatggtttgggtagaaatttggtatcgtgtttttttaagtagtttttttaattttttcgtgttttcgtttttttataatgattggatttgacgagagtgaattatagtgtaattataagggttttatgtatgattaaatattttgttaagtgtttaaagtagtatttggtattaggaaagtattatatatatgtttgttaaataaagggtgggggtttgtgaaggggtttgggggagtggagaggagtattgaattttttaggtgtttttataattcgggagtaaaattttaaaagtttggttttgtatttttagcgtggggatagtttttgcggtttttttttagagattcgagggaaataaggtattttatggtagataatttgggaagtttttggggtagtttgttggtgaagggagggataaatgttattttaatttatagtttatgatatgtttgtttttagttttttgttacgggggtagttgtttttaggggtgaatttgagggttttaagtatatcgtgagttcggttttttgaaattaggttgtttttcgaaattagtttagtttttttttatttgggtgttggtttgtttttgagtatgtttggttttttttttcgttttttgtatttaagggagaggagttttgtgttgtttggggtgatttagttttggggttaaattttgaaatgatttggtttttagagaagttgtgttggttcgttttaagtttgagggattggggaggtattatgttgtttatcggaagtattgtataaggaattagtaggattttaagttttggaattatattttttatttataggatgttttttatattatgtgatattttgtgtttatatgttggtgtttttttttttgagtgtgggaattttaaagagaaaaatattgtttttttttttttttggatggtgaaacggtttttagttttcgttatttttgttggtgataattacgggttcgttttagaagttattattgagtatttgttatgttttgagttagttaatatttaagttttatttttgtttttgagtggggtgtatgttacgttgtttttttatgagtgagtttggtttagtatgtgttgttaagtgagattatttgtttttcggggaggttgtttgaaattatgtttaatgtgatttgttttttttatattttttagttttttggtttttttaaaataaataaataataataataataataataaatagttattgttttgagtttaagtgttttaaaaggtttttgtttaaggattgtgttgtggtagatatggcggttttttttagtttatatgtggtttagaattttgttagttttgttaggtattagttttcggggagatggtttagcgtttatggggtgcgttttagttgttgtggaaaatatagacgggttatgaagttgatttcggtggtattttttcgtagtagttgtgtttttatggtaaggttagtttggtgttgcgggaaagttttaaagttagatggcggtttcgttaggggatttggattagcgtgggtttagtaggaggttaagtattacgtgaggaaggttggagagattttttttagggaggattgtattagaggtttttagcggtgatatttatttttagaggaaattatggagggagatagtttttattttaatggtattatttttagggtttagggaggttgttatgtttttggtttcgtagtttagtttttcggggttatttgttttttttgttagttattaattgttattttaggatatggtgtttttattgataaagttattttgggtagatgatattttatttcgttgttggacgggcggacgttgtaaaaggcggttttttaggttaggtttgtaggagtttggtttgggatggtttagtttggttggtgggtagtttcgattttttggtagttgcgggatcgtttgggcgtttttttgttcgcgttattttacgtttttttagtcgttgtttgcggtgatttatttcggtttttaggaacgttgttatttttggttttggtgttattaagattgtgtttagattttttgtaaatcggttattaagtagtatggggttttagtgaaagtacgcggagaatagagggggtagcgcgtttcgggaggtttttcggttttggagagttttagttttttcggggggcggaggggtcggttagaaggatttttgcgttttatattcgtagcgtcgatagggcgtgcgttttggtttagcgtttttcgattgtttttaatttaggggtatttagggtcgaagttttttttatagagtttttttttttttaggaaataaaataaaataaaataaaaattaggaaaggtaaattgtgtagatgttattaaaaagaaattttcgtttagtattgttttttttgtatttagcgatttttagataagtagaagaggagatgttttgttcgcgattaaatcggatttttttttatttattatttttttagcgtgtggtttgatgtttaattttgggttttgaatttagtttttttcggttgttttcgatttcggggtaattaggggttcgcgtcggtcgaggtttggggagcggggttttttggggttgggggaggaggtgtttttgtaatttgcggtttttaggcgggcgttattttttcgttcgttcgtgtcgggagcgttcggttcgatagtaagcgtttttggggtcgataaggttttcgggggtttggttcgtacgttataggtttcgtagaggttgcggtgagttcgttagttttagttgtttttttttaagtttttaaggtttttcggcgggtttttgttgaaagatcggtatgttttattttgtgggttttcgcgaagtgagtattgggcggttgttcgggtggacggggagatgttaggagggggttatttaggtcgcgttagtaggtagtacgcgagtaagagtagttttgtatattttattcgtttcgttttttcgtgggttttttgttttagtatagcggtatatcgattttgtagttgaaggtagtaggtggattttgttttattcgttgaagttagttttatattttttatatttagagatttgttgttaaattgagttttaattatttgggtttttgaattatgttttgttagtaatagcgttggggagggatggtttttggattatagtttaaatttattgagattttagaggtttttttttgagtttgttaaattgcgttttgtaggtgtgttattataggttgcggggtgggttattcggttagggggttgttattgttatttggaaggggattttggtttgtttttttaaagatttacggaggtcggtggttttatggttatatttgttcggtttttttaatttatgttgttaatttatggagagaaatatgtttacgaaggaagggaaagagcggcggcgtggtttggggagataggtttttatggatattttttaagtgataatggcgcgttagtaaggttattttagtttttttgttttttttgtgtagatagaattcgttttatttttgtttggtagtacggttagtttgtgttatgtgttagtgttttttgttgggtacggtttttagtttagtgatggatttagagtttagagttggatattaggttatatatacgttgaaagggtagtaagtgaaaaggagtttggtttagtcgcgggtagggtatttcgttttttgtttgtttaaaagtcgttgggtgtagaggaagtaatattaagcgggaatttttttttagtggtatttgtataatttgttttttttggttgattttttttttttttttaaggagagagaggttttgtagaggaagtttgggttt

SEQ ID NO: 6 - DNA, 6111 bp, Artificial Sequence
  chemically treated genomic DNA (Homo sapiens)
aggtttaagttttttttatagagtttttttttttttagaaaaaaaaaaaaaattaattaggaaaggtaaattgtatagatgttattaaaaagaaattttcgtttagtattgttttttttgtatttagcgatttttagataagtagaagacgaaatgttttgttcgcgattaaattagatttttttttatttattatttttttagcgtgtgtgtggtttgatgtttaattttgggttttgaatttattattaaattaagaatcgtatttaataaaggatattgatatatggtataggttggtcgtgttgttaggtagagataggacgggttttatttatatagggagaataagaaggttggagtggttttgttaacgcgttattattatttgaaaaatatttatgagagtttatttttttaggttacgtcgtcgtttttttttttttttcgtagatatatttttttttatgaattaataatataaattaaaagaatcgagtaggtgtgattatgagattatcggttttcgtgagtttttgagaaaataagttaaagtttttttttaaatgatagtgatagttttttagtcgggtggtttatttcgtagtttgtaataatatatttataaaacgtagtttagtagatttaaaggaaagtttttaagattttaatagatttggattataatttaaaaattatttttttttagcgttattgttgataggatataatttagagatttaggtagttggaatttaatttgatagtaaatttttggatgtaaaaaatatgaaattggttttagcgagtagggtagagtttatttgttgtttttagttataaggtcgatgtgtcgttatgttaaggtagggagtttacggggaggcgaggcgggtggggtgtgtaaagttgtttttgttcgcgtgttgtttattggcgcggtttgggtggtttttttttgatattttttcgtttattcgagtagtcgtttagtatttatttcgcggaagtttatagaatagggtatgtcggttttttagtaggggttcgtcgaagggttttgggggtttgaggaggagtagttggggttggcggatttatcgtagtttttgcggggtttgtgacgtgcgggttaggttttcgagggttttatcggttttagaggcgtttgttgtcgggtcgggcgttttcggtacgggcgggcggaggggtggcgttcgtttggggatcgtagattataagagtatttttttttttaattttaggaggtttcgttttttaggtttcggtcggcgcggatttttggttgtttcggggtcgagagtagtcggggagagttgagtttagagtttagagttggatattaggttatacgttgagagggtagtaaatgaaagggagttcggtttagtcgcgggtagggtatttttttttttgtttgtttaaaagtcgttgggtgtaggggaagtaatattaagcgggaatttttttttagtggtatttatataatttgttttttttggtttttgttttgttttgttttgttttttaaggagggggaggttttgtagaggaagtttcggttttgggtgtttttgggttgggagtagtcggggagcgttgagttagggcgtacgttttgtcggcgttgcgggtgtggggcgtaggagtttttttggtcggttttttcgtttttcggggaggttggagttttttaaggtcggggagtttttcgaagcgcgttgttttttttgtttttcgcgtgtttttattagggttttatgttgtttagtggtcgatttgtagggaatttgggtataattttaataatattagggttaaaaataataacgtttttgggaatcgaggtgagttatcgtaaatagcggttaggagggcgtgggatggcgcgggtaggggggcgtttaggcggtttcgtagttgttagaaggtcggggttgtttattagttaggttggattattttaggttaagtttttgtaggtttggtttaggaagtcgttttttgtaacgttcgttcgtttaataacgggatgagatgttatttgtttagaatggttttattagtgagaatattatattttggaatggtagttggtggttggtagagggaataggtgatttcgaggagttgagttgcggggttaggggtatggtagtttttttggattttgggggtggtgttattaaggtgggggttgtttttttttatggttttttttaggggtgggtgttatcgttgggggtttttggtgtagttttttttgagaagggtttttttagttttttttacgtgatgtttggttttttgttgggtttacgttggtttaggttttttgacgaggtcgttatttggttttagagttttttcgtagtattaaattggttttgttatgagggtatagttgttgcggaaagatgttatcgagattagttttatgattcgtttgtgttttttatagtagttggagcgtattttatggacgttgggttattttttcggggattagtgtttgatagagttgatagagttttaggttatatgtgggttagaaggaatcgttatgtttattatagtatagtttttaagtaggagttttttgaagtatttggatttaaaataatggttgtttgttgttgttgttgttgttgtttgtttgttttgagggagttagaaagttaaaaaatgtaaaagaagtaggttatattagatatgattttagatagttttttcgaaggatagatgattttatttggtaatatatattgggttaggtttatttatgagggggtagcgtggtatgtattttatttaggggtaagaatgaagtttaaatattagttgatttagaatatagtaagtgtttagtaatggtttttggaacgaattcgtggttgttattagtaggagtgacgaaagttagaagtcgttttattatttaaggaagaggaggaataatatttttttttttggagtttttatatttagaagagagaatattagtatatgaatatagagtgttatatgatgtaggaaatattttgtaggtagagagtataattttaaagtttaggattttgttagttttttgtgtagtgttttcggtgggtaatatggtgtttttttagttttttaggtttgaggcgggttagtatagtttttttgggagttaggttattttagaatttaattttagaattaggttattttaggtaatataaggttttttttttttggatataggaagcggaggaaaaggttaggtatgtttaggggtaaattaatatttaggtgaaagggagttgggttggtttcggggagtagtttggttttagggagtcggatttacgatgtgtttgagatttttaaatttatttttggaagtagttgttttcgtgataaggaattaaggataggtatgttatggattgtgaattggagtgatatttgtttttttttttattaatagattgttttaagagttttttaagttatttgttatagaatattttgtttttttcgagtttttgaaagggggtcgtaaaagttgtttttacgttggaaatgtagggttaggtttttaaagttttgttttcggattatgagaatatttagaaaatttagtgtttttttttatttttttaaatttttttataagtttttattttttgtttaataaatatatatatagtgtttttttggtattagatattattttaagtatttgataaaatatttagttatatataaaatttttataattatattgtaatttattttcgttagatttagttattgtgaagaaacggaggtacggggagattaagagagttatttaagaagatacggtgttaggtttttatttaagttatttggatttagggtttggaggttatgtgagttattttgtattagattaacgttttaatttagtttatagttagataatatacgttttttatttatatttatatttatttggaaggtaataaaaagataataaattgatagtgttatgtgtttatgatttagttaataaagaggttttgggttttaatgttttagttttttatgggattttatcgattttatgttttgtttttttttttaatagagatggaaatattattttgaattttgtgtttattattttttgtttttttttatagtttttttatttatggttgtatgatttttgtttgtttgttttttgagacggtatttcgttttgttattaggttggagtgtagtggcgtgatttcggttttattttttaggtttaagttatttttttgttttattttttcgagtagttgggattataggtatacgttattatgtttagttaatttttgtatttttagtagagacggggttttattttatggttgtatttttaaataatgttttgtttagttttgttatgtttttggattgtgaataagtagaattattatgttgtgtgaatttttttgttatttgtatttttgttgtaacgttatgtttttgaaatttagttaggatttatttatttttttttattgttgtgtgatattttattgtaggtaaatagtatataatatttatttattttttagatgggattttattttgttatttaggtttgtagtgtagtgattttattacgatttattgtagttttgaatttttgggtttaagtaatttttttgttttagttttttgagttgttaaggttataaatatttatttattttattgttaatgtaatttgagttgtttttaatttttttttattaaaatattattgttatgaatatttttataaaagttttttagtgtacgtgtgtgagatttttttagtgtgtatgttagtaggagaattattgagttttatcgtatatgtatttttaattttattagataatattgatttgtttttgaaattggtttttttaatttatattgttaatagtagggttatgtggttgttttgtaagtttaataatatttggtattgttagattttaatatttttgttaatttggttggtataaaatggtatggtgtggtgttttttatttgtatttttatgattattaatgaggttgagtatttttttatatgtttatgggttatttatttttttttttttatgaaattattatttaagttttttgtttatttttttgttatgttgtttgttttttttttatcgaggtggaggagttttttgtagtttgaatacgaattattttttagttatgtgtattgaaaatatttttttttagtgtgtagttttttatattttttaaaatggtattttttaacgaattaatatgggttttaatgtgttaaatatgttgattattttttttatggtttgtgttttttttgttttaaggagtttatttttattttgagtttatataattttttttgtattatatttattttatagggtttttgttttgttttgttttgttttttgtttttgagatggagttttgttttgtcgtttaggttagagtgtaatggtattattttagtttattgtaattttcgtttttcgggttttagtaatttttttgtttcggtttttcgaatagttgggattataggtatttattattacgtttggttaatgtttgtatttttagtagagatagggtgttattacgttggttaggttggttttaaatttttgattttaagtgatttgtttattttggttttttaaagtgttgagattataggtatgagttattacgttcgatttatagttttattttttatatttaggtttttaaatttatttgatttattttgtgtatgatgtgagttgagttttgatttttattatgtggataatgaaatatttttgtattattgattagtttatttttttttagttgaattgtgttatgtttatcgtttattaagtttttatatgtatgagtttgttggagaggagaatttttttttatgatttattggtttataagtttattttagtattgatgttatattgtttttattgttattgtaattaataatatattttataataaattttaatattgttcgtaataagttttagtattgttgagg

SEQ ID NO: 7 - DNA, 6240 bp, Artificial Sequence
  chemically treated genomic DNA (Homo sapiens)
taggagttatttagaggaataattttttttttttttttttttttttttttttttatttgagatggagttttattttgtcgtttaggttggagtgtagtggtacgatttcggtttattgtaattttcgtttttcgggtttatgttatttttttgttttagtttttcgagtagttgggattataggcgtttattattacgttcggttaattttttgtatttttagtagagatgaggttttatcgtgttagttaggatggtttcgatttgttgatttcgtgattcgttcgttttagtttttcgaagtgtagggattataagtatgagttaatacgttcggtttaggaataatttttaaattaatagttatgaattgttaatataaattaatatatttaattatgattttatcgtttagaaggaggttaagaaagtgaattgatttaaagaaaaatacgaagtaaataattataaaggtggattacgaaggtggtttgtgtatagtttagaagtttaggaaggaatgtcgggtagagagggtggaatttgtttcgaggattaaggttttgaagttttatttttaattgttgttttttatttttgtattgatgttttattttataagtacgtgttgtttttttattgtacgttaggtgtagaggatacggtatatttggtgttatttttatggaggtatttggagggttgtttgggggtagtattattgatttgtgtttttagggtaagtggggagtggatgaagtaaaggtaggaagttttttaggtttaaggattagtttgtgtgtagggaggaagggagaatgaagcggggaaaagtaggttggatttgaattgaaagaggttattggggtggagtatagaagtgataggggagagcgtttgagatgaggttagagaattattgggggttggattatataggttttgtaggttacggtaaggattgtgggtgttgttatttatttggttaatatgtattgggtttttgttttgtgttgggtatggaggggtatacgatgttattaggtttttttttgaggtgtttgggtgtagtagtaggtttttgaatatattggtagtatttttttttttttttttttttttttttttttgaaatagagtttcgttttgttgtcgtttagattggagtgtagtggtacgattttcgtttattgtaatttttattttttgggttcgagcgattttttcgttttagttttttaagtagttgggattataggcgtgcgttattacgtttagttaattttgtatttttatttatttatttatttatttatttattttttgagatagagttttatatcgttttttaggttggagtatagtggtataatttcggtttattgtaatttttgtttttcgagtttaagcgatttttttgttttagttttttgagtagttgggattacgggtatttgttattatgtttagttaattttttgtatttttattagagacgaggttttattatgttggttaggttggtttttaatttttgatttcgtgatttgtttattttagttttttaaagtgttgggattataggtatgagttatcgcgtttagttttagtggtatttttttaagtgttgtgatagaggtgggaattggagattggggaagcgtagaggggagtgggggttggtgtgtatgataaggtagtgatattgagttgggttttgaaggatgagtaggagtttgataagagggagaggaaaggtatttttggtagtgggaatagaatgagtaaagttatagaggtatgaaaaagtttcgatgatttggggagacgttggtagttggagttatagtgggtagtagaaagaggataggttagagggttaagtttatagaaggtattaaggtttaagttagagttaaggttttattttgtaggttgggtattaggtttgaatgggagagttttatttatatttttaggtagagttttttgttgacgtgtgttggtggggttgggtgataggggagggtagtatagtcgttattgttcgatggggtgtggaggtggttaggtttgggttgtggtaggggattggacgagggaagtttttttgtgtgtttttgaaggtgggggttgtagagtatggttgtttttgtgtttttagtttgggttggtttggtgtttagagtagggattttttattatagagttaattttgggttatttgttgtattaatttggaagattagaggttttgtttagaagagtaaagattttagttagttgggtttatggtttgaatttaaagtaaataggaagagagtatggtgggttaggtagggtttttttttttgtttagaaaagggattagtttaggtcgatttgtgggtttttttgttgtaaaggtgggagggggttgtaggtttcgttagggatatattaaaaggttttttaggggtaggtatggtgttttagtgttagtttggggggtgttgtaaagatgggtttttttggcgaattttatttattttgatgggaggagtttggtagtatgtgttgggagttattgtttttttttttattacgtttaagttggagttttttttgatatttgatttcgtacgattgttttttggggttattatttaagtttaatggggtgtttgttagttattgtagtgggaggtttattttggttttagattaaggttttttggggaaatgttaaaggtttagaatatttttagttttaaaggtgggtatttaggatttttttaaagattttgggtttagattcggtttttatatattagacgagaggcggtaggtatttgtgttttgtttatgtttgattgaattaatttacgtgtttttttagtttatatattgtatttatttaagaagtttttttgtaagtttaggggtggtaggggtggtaggggtggtagacgagtgaggtttttagggagtagagttgagggagtaggaaggtatgtggggttttgatatgttggggtttggtacgagttcggtttgtttgttatgtttggagaagggtttagaagaggtaggtattttttttgggggtaggtgtggggtggggataagttgggagatagaggttagaaagattttggtaaggagttttttttggattgatttatttatttatttatttaatttttcgtgtatgtgcgtatttatttaatattttagtaatgaggatttattgtgtgttaggtattgtgttaagtgttggtgaggttttgttgttatggggtttgtagtttaggatttaagttattattatatagattaaagggaaaattacgttgagttttggggttttgtagaataggtttgtggagttaatggagtttataggagtttgatttggttagggaggttagggcgcgttcgttgcggaagatttgtaggatggaaaggaattaattaaggtaatagggaagagaagatttaggtagagggaataggttgtgttaaggttttggggtttgatgaaggttagagtggttggggtattgtaataggggggaagaggttaggaaatgggtaggttgattgtattcgggtttgtgggtgtttttagaaggtttggtttggattttataagtaaaaggaaggttttttttagtagtggtataaaatgatttaatttgtgttgagtaggtttaagtaggttcgaatggaggtagggagtttataggggcgttgttgtgtttatataaatgatgagaatggttttgattaagtgtattttgcgatgggggaatgtgggtgaattggatgtggagtgaggttaggcggtgtcgaggtttgagaaattgggttggtggatggggaaagtgataatgaatataatttttttgtaaggtgtgtattttattttgtatggtaagtaatatttttatttttattaaggatagaaagaggtaattgttgagttttgggtaagaaagaagggaacgatttttttttttttttttttgagttttattttgttatttaggttggagtgtagtggtgcgattttagtttattgtaatttttgtttttcggatttaagtaattttttgttttagttttttaagtagttgggattatagacgttcgttattacgtttaattaattttttttgtatttttagtagagacggggtttcgttatgttggttaggttggttttgaatttttaatttcgtgatttatttatttcggttttttaaagtgttaggattataggcgtgagttattacgtttagtcgggaatgatttttaattattttattatttggtgtttaatatgtttttttattaaatttgtttaataaatttgagaggtaaatattgttatttatttatgaggagagaggtttagaagggtaaagttatttgtttaaggttatagttggaaagaggtgaagtttttagtaaaaaaagtaaaataatttattttattttatttcgtgagttgataatggaggaaaaagtatttggtaagaagcggtagggaggggaatttggaggaattttttgtttttgaagaatgtaagggaggttgggattttgttattgaggagtttttggtatttttttagagatgtaattaaaggggtgattttagtgtgtttttaataggagtcgggaattttttttttgtgtattttttattttttgtttttgggaagtttttttttgattttaattttagttttgatgttgtttttatttttttagtttttaagtagattaatgtaatgttatttggtcgtttgttttgtttattgggtttatagtcggaagtttgttttttagttttcgggtttgattttaggtcgtttgtagtttgtaattagatattgtttgtttttagtaggtatttttcgagtttagttttatatatcgtttttggattttttttttttaggcggagcgtgtttttgtttagtttagtgattttcgtttgttggagttttggttaatttttgtttagtttgtttgttgtggggttttttttttttggggatataagttcggtttggggttgtttcgttttttgtttggtttgaggttttttgagtcgtttttttattattattatggttaagggtttttatatttttaagtttttgggtattttggggatttttttgggcgtggtagtcgtgtgtataattatcgtattgttagtggtgtatttttaggagaagaataagaacgttaatagttttttcgtggtttttattatttcgttcgttttagttattattaatttcgtttcggttattattttggattaaagtaaagcgtggaatcgttatcgtttttttaatacgttgaaattcgatttttatcgggtgacgttgagatcgtattttatttttaatgataggggtttgtacgtttttaagggttttagtatcgttcgttttatttgtaaggaggttattgacgttattattatttatagtaagaagtttaattatatttttagttagggtatagggtggttttgcgtggtgtgggaggtttttagtttttcgatattgataagattgagttggtggagtttatcgagtatttggtggtgtattttaagggttttttggtgaaggatagttagtatgagatggatagcgagttcgagggggagttggtagatgatttggcgggtttttatcgtagcgagtatatggagggtaatgttagaaagtgagtttcggttgggttgttcggtggggtggattcgaggtgttgaggtaaggttggattttgagggttaaggaaggatttagtttgtaggtttttgaattttgtggagttcgagattggtttattgttttatttttagttgttggtaaagtagttgtaaatgtatcgaattgggagggtttttttattttttattagggagttggggatgagggatagagcgttttttggatagataggaaaatcgaggtttagaggagagaaatttattcgaggtttttgagagtttgttggtatttcgaatttagaaggagttttaatttttacgagttagttggtttggtagggtttcggaggttttcggcgaggcgggggtgggagtaggagtaggggttaggttggggtagttttttatgtatttttttttttgtatgtttggtagtatttttagagttttttttatatttttagttttggtatattttttaatttttttgttggggtagg

SEQ ID NO: 8 - DNA, 6240 bp, Artificial Sequence
  chemically treated genomic DNA (Homo sapiens)
tttgttttaataggaaggttagagggtgtgttagagttgggggtgtgggaggggttttgaggatgttattaggtatgtagggaaaggggtatatggaaggttgttttagtttaatttttgtttttgtttttattttcgtttcgtcgggagttttcggagttttgttaggttagttgattcgtgggggttggggttttttttggattcggggtgttagtaggtttttagggatttcgggtgagttttttttttttgagtttcggtttttttgtttgtttaagggacgttttgttttttatttttagttttttggtgaggggtggggaagtttttttagttcggtgtatttgtagttgttttgttagtagttggaggtgaagtaatgggttagtttcgggttttatagggtttaaaggtttgtaagttaagtttttttttggtttttagaatttagttttgttttagtatttcggatttattttatcgggtagtttagtcggaatttattttttgatattgttttttatgtattcgttgcggtagaagttcgttaggttatttgttaattttttttcgaattcgttgtttattttatattggttgttttttattagggagtttttgaggtgtattattaggtattcggtgggttttattagtttagttttgttaatgtcggggggttgggagttttttatattacgtaggattattttgtgttttggttgagggtgtagttgagttttttgttgtggatgatgatgacgttagtggtttttttgtaggtgaaacggacggtgttggagtttttaaaaacgtataggtttttgttattgggggtgaggtacggttttagcgttattcggtaggaatcgggttttagcgtgttggggaggcggtaacgattttacgttttattttggtttaaggtggtggtcgaggcggggttggtggtggttgaggcggacggggtggtggaggttacgggggagttgttggcgtttttgttttttttttgggagtatattattgatagtgcgatgattgtgtatacggttgttacgtttaggaggatttttaggatgtttagggatttggaaatatagaagtttttggttatggtgatggtggggaggcggtttagggagttttaggttaggtagagaacggagtagttttaggtcgggtttatatttttaaaggggaggagttttataataggtagattgggtaaaaattaattagggttttaataggcgaaggttattggattgggtaggggtacgtttcgtttggggagaggagatttaggaacggtgtgtggagttgggttcggggggtgtttgttggaagtaaatagtgtttggttataggttgtaggcggtttgggattaggttcgagggttgaagggtaggttttcggttgtaggtttagtgggtaaagtaagcggttaggtggtattgtattgatttgtttgagagttgagagggtgggaatagtattagaattgaggttagagttagggaaggattttttaggggtaagaggtgggaggtgtatagagaaggggttttcggtttttattaagaatatattggggttatttttttggttgtatttttggaaggatgttaggggttttttagtgataaggttttagttttttttgtattttttaagagtagggagtttttttaggtttttttttttgtcgttttttgttaaatatttttttttttattattagtttacggaataaaatgaaatgagttgttttgttttttttgttgaaggttttatttttttttagttgtgattttgagtaggtaattttatttttttgaatttttttttttataaataaataatagtatttgttttttaggtttgttgaatagatttagtgagaaaatatattaaatattaaatagtagaatgattaaaaattattttcggttgggcgtggtggtttacgtttgtaattttagtattttggaaggtcgaggtgggtggattacgaggttaggagtttaagattagtttggttaatatggcgaaatttcgtttttattaaaaatataaaaaaaattagttgggcgtggtggcgggcgtttgtaattttagttatttgggaggttgaggtagagaattgtttgaattcgggaggtagagattgtagtgagttgagatcgtattattgtattttagtttgggtgatagagtgagatttaaaagaaaaaagaagaaaatcgttttttttttttttatttaaagtttaataattgtttttttttatttttggtagaaatgaagatattatttattatataaaataaaatatatattttataggaaaattatgtttattgttattttttttatttattagtttagttttttagatttcgatatcgtttgattttattttatatttaatttatttatatttttttatcgtaagatgtatttggttaaaattatttttattatttatgtggatatagtagcgtttttatggattttttgtttttattcgggtttgtttgaatttgtttaatataaattggattattttatgttattgttaaaaaaaattttttttttgtttgtagagtttagattagattttttaaaggtatttataagttcgggtatagttagtttgtttattttttggtttttttttttttgttgtagtattttagttattttggtttttattaagttttagggttttggtataatttgttttttttgtttggatttttttttttttattgttttggttaatttttttttattttataagtttttcgtagcgaacgcgttttgatttttttgattaagttaagtttttatgagttttattagttttatagatttgttttgtaaagttttagaatttagcgtggttttttttttgatttgtgtggtgataatttgagttttggattgtaggttttatgatagtagggttttattagtatttagtatagtgtttggtatatagtaggtttttattattgagatgttgagtggatgcgtatatgtacgaaggattgagtaaatgaatgaatgagttagtttaggagaaattttttattaaagtttttttggtttttgttttttagtttgtttttattttatatttgtttttagaagaagtgtttgttttttttgagtttttttttaagtatggtaggtaggtcggattcgtgttaggttttagtatgttagggttttatatgtttttttgtttttttagttttgttttttgagggttttattcgtttgttatttttgttatttttgttatttttgagtttgtaggaaggttttttaaataaatgtaatgtgtgaattgaagggatacgtggattagtttaattaggtataagtaaaatataaatatttgtcgtttttcgtttggtgtatggaggtcgagtttgagtttagggtttttaggggagttttgggtgtttatttttgagattgagggtgttttgagtttttggtatttttttaaggggttttggtttgggattaggatggattttttattgtagtgattagtagatattttattaggtttgggtgatgattttaaggggtaatcgtgcgaaattaggtgttaggaagggttttagtttgggcgtggtgagagaaggagtagtggtttttagtatatgttgttaggttttttttattagggtggatggaattcgttaagggagtttatttttatagtattttttaggttggtattggggtattatgtttgtttttgaaaagttttttgatatgtttttgacggagtttgtagtttttttttatttttgtagtagaaagatttataagtcggtttggattaattttttttttaaataaagaaagaggttttgtttggtttattatattttttttttgtttgttttggatttagattataggtttagttggttggaatttttatttttttggataaggtttttggttttttaagttggtgtagtaggtagtttaaagttggttttataatgagaggtttttgttttaggtattaggttaatttaggttgggggtatagagatagttatgttttgtagtttttatttttaggaatatataaaagggtttttttcgtttagttttttgttatagtttaggtttggttatttttatattttatcgggtagtggcggttatgttatttttttttgttatttaattttattagtatacgttagtagagggttttgtttaagagtgtgggtgggatttttttatttaaatttggtgtttaatttgtagagtgaaattttaattttggtttgggttttaatattttttgtgaatttgattttttggtttgttttttttttattgtttattgtggttttagttgttagcgtttttttagattatcggggtttttttatatttttgtgattttgtttattttgtttttattgttaggaatgtttttttttttttttttgttaaatttttatttattttttaaaatttaatttaatgttattgttttattatgtatattagtttttatttttttttgcgtttttttagtttttagtttttatttttattatagtatttaggaaaatgttattgaggttgagcgcggtggtttatgtttgtaattttagtattttaggaggttgaggtgggtagattacgaggttaggagttggagattagtttggttaatatggtgaaatttcgtttttaataaaaatataaaaaattagttgggtatggtagtaggtgttcgtaattttagttatttaggaggttgaggtaggagaatcgtttgaattcgggaggtagaggttgtagtgagtcgagattgtgttattgtattttagtttgggggacggtgtaagattttgttttaaaaaataaataaataaataaataaataaataaaaatataaaattagttggacgtggtggcgtacgtttgtagttttagttatttggggggttgaggcggaagaatcgttcgaatttaagaggtggaggttgtagtgggcggagatcgtgttattatattttagtttggacgataatagaacgagattttgttttaaaaaagaaaaaaaaaaaagaaaaagaaaaatgttattagtgtgtttaaaagtttgttgttgtatttaagtattttaaaggaaggtttggtggtatcgtatgtttttttatgtttagtataaggtaggagtttaatatatgttggttaaatgaatgataatatttatagtttttgtcgtgatttatagggtttgtgtgatttagtttttagtgattttttggttttattttaaacgtttttttttgttatttttgtgttttattttagtggttttttttagtttaaatttaatttgttttttttcgttttattttttttttttttttatatataagttgatttttgggtttggaaagttttttgtttttgttttatttattttttatttgttttggagatataagttagtggtgttgtttttaggtagttttttaagtgtttttatgagggtagtattaggtgtgtcgtattttttatatttggcgtgtagtgggagggtaatacgtgtttgtggaatggggtattagtgtaagaatgagagatagtagttaaggatggaattttagagttttgattttcgggataggttttattttttttattcgatatttttttttgggtttttgggttgtgtataaattattttcgtgatttatttttgtgattatttatttcgtatttttttttaaattaatttatttttttagtttttttttgagcgataaaattatggttggatgtgttaatttatattaataatttatgattattggtttaaaaattgtttttgggtcgggcgtgttggtttatgtttgtaatttttgtatttcgggaggttgaggcggacggattacgaggttagtagatcgagattattttggttaatacggtgaaattttatttttattaaaaatataaaaaattagtcgggcgtggtggtgggcgtttgtaattttaattattcgggaggttgaggtaggagaatggtatgaattcgggaggcggaggttgtagtgggtcgaaatcgtgttattgtattttagtttgggcgatagagtgagattttattttaagtaaaaaaaaaaaaaaaaagaaaaaaagaaaaaattgtttttttaggtagttttta

SEQ ID NO: 9 - DNA, 5888 bp, Artificial Sequence
  chemically treated genomic DNA (Homo sapiens)
attagtaagttatagaagaatatagtattgtatatgatgtttatttattttagttttttgttttggtttagtatggttatatgtataataagtttaagattttgagttataattattttttagaggtatttttataatttatgtaaagttggtagttgtttttttatagaaagtttttgaataaggagtaagataaagagttatagttgggtgggtgtagtggtacgtgtttgtatttttagttattggagaggttgaagtgggaagttttttgagtttaggaattttgagtttagtttgggtaatatagtaagattattttttaattttatattttatatcgaatattatttttatttaagaaagagaaaaaaaaaaagagttgtaggtagtagattttgttttgtggatttgtggattagagtaattagtagtgagaattttggttttattttagatttattaaattagaattttttttttagtaagatttaagtgttgttttgggaagaatgaagagaggggattgataaattatttgatatgtttgattatggaaattgtgtttagagttaattagaggagtgggaaaaatttgtgaggggaataaagaaaattaaataaaggaataaaaatgaattattttattttttttttatttttaaaaaaataagaggttgtatatgaaaataaatgtaattatatatgatatttggtttcgtaaaattatagttatatagttatagtattggaaatatggaatagaatttgtgatgtattattattggtggtataagagagttaaattataattgattataatagggtatagaaaagtaatatttagaaatggatatatagagaaatagtagtataaatatggtattgtttttagaaatatgtagataagtattagataaaataattgagtatttaaagaagttgtttttggggatttaggagtaataggttggaagtgggaagtggaattgatattttttaaaagtattttgttttatttggttttttttttaaatatatgtaatatatataaagagtttttttaaaaattttgatagaatgatattgttttgagaaatatgtagataagtattatataaaataattgaattatatttaaaaagaaaagacgttgattgggcgtggtggtttatatttgtatttttagtagtttgggaggttaaggtagttagattatttgaggttaggaatttaagattagtttggttaatacggtgaaattttatttttattaaaagtataaaaattagttaggtatggtggtgtatgtttataattttagttatttgggaggttgaggtacgagaatcgttttaatttaggaggttgtagtaagtcgagattgtgttattgtattttagtttgggcgatagagtaagatttcgttttaaaataaataaatagatttaaatggttgttttagtgatgaaagttaagtaagatgagaacgagagtaattattgaatttgatatgaggataatattgagaaatttgaatagattatagtgaaaagtagggaggggaaataaatgttgatattttattattaggttttatatgaagtatattatattttttagtttaaatgattttatgtttaagaagaagaagtttttgtttttatttcgtagtgggtttgggaagagtaggaattttttaagagtagtattattttataaggttttttttatttaggaattatgataggtaggggtattttaggggtattttagaggttttgttttttaaattttgggaaatttagagattttgttttttattgtgtaagattgatgatttggtttttgttaaaaagatttagatgttatttaattaaaatagtgtttgttatgtaatagtttgagttttaagtatttttttttttttttttttagattttttttttttagtatggtttcgttagttgtaagtaaaagtttttttttttttttgaaaataatgttttatgagaatatgaagtatgagataaaagtattattgaaaggggttgataagagaagtgaaatgaggaaggggaaatagattataggtgatatgattagaaagttaagtatgaagaggaaaatgggataggagttttttaaattaggaaggttaaggaacgatgggtttgaatgaagttataaattttattttagtttatgtgttgatgagaagatagggagtaagaattaggaaagtttagtttaagaggggaagataagtttggaaataaaagatgataataaatatatttgtttttgaaattagggtttagattaggtgtttgttatgagaaagggattaagtgttataggatatatttggtttattttttaggaaagtttattttttttggaggggataaaggttaattaggagaagttttagaagtgaggttgtatttgtttgatgtaatgtttgaaagatattgtagaaggtgtagtttttatatgagtttttgagggaagaataggagtttattataaagataagagggaataggttagtcgcggtggtttatatttataattttagtattttgggagatcgaggcgggtgtattatttgaggttaggagtttaaaattagtttggttaatattgggaaattttatttttattaaaaatattaataaagttaggcgtggtggggtacgtttgtagttttagttatttgggaggttaaggtaggagaaatgtttgaatttgggagttagaggttgtagtgagttgaaattgtgttattgttttttagtttgggtgataaagtgagattttattttaaaaaaaaaaaaaaaaaaaagttaagaagagatagaatattttggaagggggaaggtaagtattgttatttggaggtttgagaggtattgtgggttgaggtaattatatttattttaaatttagtttgtgggtggataagtagggaaggagaaggggaatggagaaaaagtttttaggaaagaagtaaggagattgttagagtatttttttgattagattaagttagatttatagtatttttttaattagattaaggtgtataaatttgatgttgaagttattagggagatgtggaaggatttttaagtaaaaagtgatatgattagatttgtatttgggaaagattatttttttggtagtttggtgggtgaaatggagtaattgttttttgttttaattataattttaatttaaagataaataataaaattgggaagaatgtttgttataaatataatataggattgatatttttaagttattaaaatttatatagattgttaagaattagtattaggattagttttgaaaataatgggtaattggtttgaatagtttatttttagaatgtattaaatgtttaattaatatataaaaaattttagtttcgttaatatataaaggtataataaataataatttaattaatttgatttattttaatagtaaggatgtgaaataataattttttagtgttagtagggattaggtgagggtatttttattgagggtgtgatggatttaatattttaggaagggattgtagaaatatgttgatattaggtcgggtatggtggtttatatttgtaattttagtattttgggagattaaggtaagtagattattgaagtttaggagttcgagattagtttggttaatatggtgaaattttgtttttattaaaatataaaaattagttgggtatggtggtacgtgtttgtaattttagttatttaggaggttgaggtaagaggaaaattttttgaattttggaggcggaggttgtagtgagttaagattacgttattgtattttagtttaggcgatagagtgagatttcgttttaaaaaaaaaaagaaaagaaaagaaatatgtttatattatttgatttgatgattttatttttggaaatttattaaatagtttattaggatattatttaatttgtaaataaagatttatatataaagtgtattatttataataggaaaaaaattttaaatgttttataattatggtaattatataattattaataatattttgagttatataaaaagtttaattgattgtttttatgatatatataagtataaaataaattttggaaggattatgttaaaatgtgaattgaggttattattagttagtagattaagtgtgatttttattttataaaaatatttttttgtatttttaaatttttttataataatgagaggtaggtttagtataaattaaggaattgtaggttttatgatgagttgttttaaaagaaataattgttagggaggtaatttttgggttttgtaaatagaatttatagtttatttttaagattggtttttaatggagttgttttaatagatatagtatttaaggtggacggacgttttaataacgaagatggttatagatagaggttattgttattttggtttttgggtttttattttttaattcgtagaaataataatagaataataatttatttttcgttgagtttttattatgtgttaagtattttatttgtttaattttatttaatttttttaatatttttttaagaaaggtatgattaatattattattattttagagattaaagaattgaggtttggaaagaggaaataattggttgaagttattatattttatttgtgtgtttttttgtttttttttttttttttttttttttgttttttatttggtttagtttattaatgtatattttgatttttgagttgaagattataaatttagttttttatttttttgaaaaattttttattttttttttttttttttttagagtgaatatattaggttatttggaggtaggtttttttgagagtatttttcgttttttttttttgttggtttttaatttttgtttcgggggttatagttagtttttttatttggtagtagtggttttttgtgtttttttttttaagattatttaggttagtatgtgtggttatttttagttttttgagggagtgagtagttagaggggtatagtatatttttttttttttagtttttttttttttggttttaggttttttattttttaagtttttttgtttgttttagtttttgttttttgttttatttttttttatttttttttttttttttaatttatttttttggattttatttttgtttttatatttttatttttattattattgttaaaagtaaatattaaatttttgtatttgaaaaaagattttggttaggtacggtggtttacgtttgtaattttagtattttgggaggttaaggcgggtggattacgaggttaggagttcgaggttagtttggttaacgtggtgaaatttcgtttttattgaaaatataaaaaatagcggggtatggtggtgcgcgtttgtagttttagttatttcggaggttgaggtagaataatcgtttgaatttaggaggttgaggttgtattgagtcgagattatgttattgtattttaagttgggtaatagagtaagattgttttaaaaataaataaataaataaataaaaaggagattttttttttagtgtagtgattttaagatttgtttatcgatatgtaattaattaatgagtgttatgttttatagttttttttttttaagttttagagttagagtagtgggtgggaaggtgataattatagtgtaaattaaaaatttatattggggatggaggttgagaggaggttttaggggtaaatgattagaatatttgtagttggaaagaattgtagagaggattttggaaagcggagggttgatagagtcggtagttgttttttgtttatttattttttagg

SEQ ID NO: 10 - DNA, 5888 bp, Artificial Sequence
  chemically treated genomic DNA (Homo sapiens)
tttaggagatgaatggataggagataattatcggttttgttaatttttcgttttttaaagttttttttatagttttttttagttgtaagtgttttggttatttgtttttgaaatttttttttagtttttatttttagtatggatttttagtttatattgtggttattatttttttatttattattttaattttaaaatttaggagaagggaattgtgaggtataatatttattagttggttgtatatcgatgaataaattttggaattattgtattaaaaaaaaagttttttttttatttatttatttatttatttttgagatagttttgttttgttgtttagtttggagtgtagtggtatgatttcggtttaatgtaattttagttttttgggtttaagcgattgttttgttttagttttcggagtagttgggattataggcgcgtattattatgtttcgttattttttgtatttttagtagagacggagttttattacgttggttaggttggtttcgaatttttgatttcgtgatttattcgttttggttttttaaagtgttgggattataggcgtgagttatcgtgtttggttaaagtttttttttaaatataagaatttggtatttgtttttggtaatgataataaagataagggtataaaggtagaaatggagtttaaggaaatgaattggagaagagagaaaagatgggaggagatggagtaagaagtaggagttgaagtaagtaaaagggtttgaagagtagagggtttaggattaaggagaaaggagttggagggagagaagtatgttatgtttttttggttgtttatttttttagggagttgagagtaattatatatattgatttgggtgattttggagaaaaaggtataagaggttattgttattaagtgagaaagttggttgtggttttcggggtaaaagttaaaagttagtaggaaaaggaagcgggaggtgtttttaggaaagtttgtttttaggtggtttggtatatttattttgaggaaaaaaaaaagggagatgaaaagttttttagagagatggaaaattggatttgtggtttttagtttagaaattaagatatgtattgatgagttggattaaatgaaaggtagaaaagagaaaaagagaagagaggtaaggaaatatataaatgagatgtgatggttttagttagttattttttttttttaagttttagttttttgatttttaaaatggtaataatattgattatattttttttgaagaggtgttgggaggattaagtgagattaagtaggtaaagtgtttagtatatagtaggaatttagcggaggataaattgttattttattattatttttgcgggttgaaaaatgaaagtttagaggttaaggtagtagtagtttttgtttatagttattttcgttattggagcgttcgtttattttaggtgttgtgtttgttggaataattttattaaaggttagttttaagggtaggttgtgaattttgtttatagggtttaaaagttgtttttttgataattattttttttgaagtaatttattatgaggtttataattttttaatttatattaaatttattttttattgttatgaaaaaatttaaaaatatagaaaaatatttttataaaatggaggttatatttaatttattaattaatgatagttttaatttatattttggtatagtttttttaagatttattttatgtttatgtatattataaaagtaattaattagattttttgtgtaatttaaaatattgttaatagttgtataattgttatgattgtgggatatttgggattttttttttattgtaaataatatattttatatataagtttttatttgtaaattggataatgttttgataaattgtttaataaatttttagaaatagagttattagattaaatggtataagtatatttttttttttttttttttttttttgagacggaattttattttgtcgtttaggttggagtgtagtggcgtaattttggtttattgtaattttcgtttttagggtttaaaggattttttttttgttttagttttttgagtagttgagattataggtacgtgttattatgtttaattaatttttgtattttagtggagatagggttttattatgttggttaggttggtttcgaatttttgagttttaatgatttgtttgttttggttttttaaagtgttgggattataggtgtgagttattatgttcgatttagtattagtatatttttatagtttttttttgaaatgttgaatttattatatttttaatggaggtgtttttatttaatttttgttagtattgagaagttattattttatatttttattattgggatgggttaagttaattaaattattatttattgtgtttttatatgttagcgaggttggagttttttatgtgttaattagatatttaatatattttagaaatgagttgtttaggttagttgtttattgtttttaagattggttttggtgttagtttttagtaatttgtgtgaattttaataatttaaaaatattaattttgtattatatttgtaataaatattttttttagttttgttatttatttttgagttggaattgtgattaagataaaagatagttgttttattttatttattagattgttaagagaatgattttttttaaatgtaaatttgattatattattttttgtttaaaaatttttttatatttttttagtgattttagtattaagtttatgtattttaatttggttaggaaaatattgtaggtttagtttgatttggttaagaaaatattttggtagtttttttgttttttttttgagggttttttttttattttttttttttttttttgtttgtttatttataggttgaatttggagtgggtgtggttattttaatttataatgttttttaggtttttagatagtagtgtttgtttttttttttttagaatattttgtttttttttaatttttttttttttttttttttgagatggagttttattttgttatttaggttggagggtagtggtataattttagtttattgtaatttttgatttttaggtttaagtattttttttgttttagttttttaagtagttgggattataggcgtgttttattacgtttggttttgttggtatttttggtagaggtggggttttttaatgttggttaggttggttttgaatttttgattttaagtgatatattcgtttcggttttttaaagtgttgggattataggtgtgagttatcgcgattagtttgtttttttttatttttatgatgaatttttattttttttttaaaagtttatgtaagggttgtattttttgtaatgttttttagatattgtattaagtagatgtaattttatttttagggttttttttgattagtttttgttttttttaagagaagtaggtttttttggaagatgggttaggtgtattttgtgatatttggttttttttttatggtagatatttgatttgagttttagttttagaagtagatgtgtttattgttattttttgtttttaagtttgttttttttttttaaattgagtttttttagtttttattttttgtttttttattagtatatagattgaaatagaatttgtggttttatttaaatttatcgttttttagtttttttagtttgaaaggtttttgttttatttttttttttatgtttaattttttgattatattatttataatttatttttttttttttattttattttttttattagttttttttaatgatatttttgttttatgttttatatttttataagatattgtttttaggggggaaaaagagtttttatttgtaattaacggagttatattgaaaagaaagggtttgggggaaagaagaagaaagtatttggagtttaagttattgtataatagatattattttgattggatagtatttgggtttttttgatagaaattaagttattagttttatataatgaaagataggatttttaaattttttaaggtttagagaatagaatttttaggatgtttttaggatgtttttgtttgttatggtttttgaatgggagaggttttgtgaagtggtgttgtttttaggaagtttttgttttttttaggtttattgcgagatagaaataaaaattttttttttttagatatgaaattatttgggttgaggaatatgatatgttttatatggaatttaatgataaaatgttagtatttgttttttttttttgttttttattataatttgtttaaattttttagtgttatttttatgttaaatttaatggttattttcgtttttattttatttgatttttattattgaggtaattatttgagtttatttatttattttgagacggagttttattttgtcgtttaggttggagtgtagtggtataatttcggtttattataattttttgggttaaagcgattttcgtgttttagttttttaagtagttgggattatagatatgtattattatgtttggttaatttttgtatttttagtagagatggggttttatcgtgttggttaggttggttttgaatttttgattttaagtgatttggttgttttgattttttaaattgttgggaatataggtgtgagttattacgtttagttaacgttttttttttttaaatgtggtttagttgttttatgtggtatttatttatatattttttaagataatattattttgttaaagtttttaaaaaagttttttatatgtattatatgtatttaaaaaaaaaattaaatgggataaagtgtttttaagaaatgttagttttattttttatttttaatttattatttttgaatttttagaaatagtttttttaagtgtttagttgttttatttggtatttatttgtatatttttagagataatattatatttatgttgttatttttttatatatttatttttagatattatttttttatattttattatgattaattatgatttagtttttttatattattagtagtaatatattataaattttgttttatatttttaatattgtggttatgtaattatagttttacgggattaagtattatatatgattatatttatttttatgtataattttttgtttttttaggagtagggagggggtgaaatgatttatttttgtttttttgtttagttttttttattttttttataggttttttttatttttttaattgattttaagtatagtttttatagttaagtatattaggtaatttattaattttttttttttattttttttagagtagtatttgggttttattgaaaaagagattttgatttagtaggtttggaataggattaggatttttattgttagttgttttggtttataggtttatagggtaagatttattgtttatagtttttttttttttttttttttttgagtgggggtggtgttcggtgtagggtgtggggttggggggtggttttgttatgttgtttaggttggatttaaaatttttgggtttaagggattttttattttagtttttttagtagttaggaatataggtacgtgttattgtatttatttagttatagttttttattttgttttttatttagaagttttttgtgaagaggtagttattagttttgtatgaattatggagatgtttttgagggatggttgtggtttaaggttttgggtttgttatatatgtggttatattgagttaagataaaggattggggtgaatgggtattatgtataatattgtatttttttgtggtttattagt

SEQ ID NO: 11 - DNA, 5216 bp, Artificial Sequence
  chemically treated genomic DNA (Homo sapiens)
gtataggggtaggatttgcgttaggaataaaggttttcgtgtttttttgtttaggtgtgtttttatggcgattggttaagtagatatttttttgagtagaagtaaaattgttttgttaataattttttgttcgagtgtttaattttttttaggattttgagcgttatttttaagagaaagaaaagaaagaaaggaaggaagaaagaaagaaagaaagaaagggagaaaagaaagaaagaaaagaaaagaggaaaggaggaagggaagagaggggagggggaaagagagaaagatattggtttgtgggataatagaaaggcgggataattcgaagtggggcggtggggggtttttagtttataggtagattttaaatttttttggttgataattggttgagtttttttaaagatttgaaattaatagaaaggaatgtttgggttaagataaaggattgtggagatttaagtttttatttgtagaggaaatttttaaattttaggttttagagagaatgggttgtaaaatgttttttattaaatttaaagtttgtgttgatgttaacggtagagaggtataatgaggtacgtttaatttttattttttattatggtttgaaacggttattcgggtttaattttgaaagagttttggttgaggaggaagtttatttagatggttgtggggggcggttttagaattttatttttgttttatagaatgtttattataatgattattatttttattttatatgtgatgaaaatgagaaagatattattattttatttttttgtataaaattgaatttttataatttttaggataaaattttttattaaatgtggagtgttattagtttattaggtattgaggaaatattagtgaataaaaaatcgtgttttttatatttaaaattggaattgtggtcgatttagttttatatggtttaatttttgtatatttttttaatttggatttattttttttgggattttttttttgttaataagttttgtttttttttttttttattttatttttatttttgggggaggttttcgtataagttgttttttttgtttgtattttttttttttttttttattagtattttttttttaatattatttttaatatgttaagtttagtgttatttatttagaattattgtattaatgatttagtttttttataattttttttatagttattattaagttatagtgtaattatttgatgttgtttttttttagatttttttggtagttttagaagattagggtttcggtggtatttaagaatttttataggaaatttttaatttttaaaaagttatataatttaggtaaaggtttaattaagtataaatttaggaaaaaggttatttttaaaattaattttttttttttgaatttaattttattttttggagttaattaatgaagtttgtaattttttttataaaatagtatgttaaaatatttataggttattattttattttttatatttttttttttagtatttatttagtttttggagagttatttattgagtatttgttgtgtattatgttttggttagggatagggtttggattttgagtttttttttatgtaattgtttggtttttttttttaattttttaattaaaaaaaatttatttttttatttttttaagaaaaatttttttatttttattttatttatttatttttttttttgagttagggttttgttcggttgtttacgttgtagtgtagtagtgtaattatggtttattatagtttggaatttagttttaaatgatttttttagtttggttttttaaagtgttagaattattggtatgagttattgtatttaatttaggttagtttttaagatttatatttggtttagtaaggtggtttatgtttataattttagtattttgggagatggaggtaggtggattatttgaggttaggagttcgagattagtatgattaatatggtgaaatttcgtttttattaaaaatgtaaaattaattaggtgtggtggtacgtgtttgtaattttagttatttaggagattgaggtaggagattcgtttgaatttaggaggtggaggttgcgatgagttaagattgtattattgtattttagtttgggtaataagagtgaaattttatttaaaataataataataataataataataaaatttatatgtgttttaggtggggaagatgaaaaaagtttttagttaaaagttatattttgtttagtgtttgtttagatagttatagttgtttaaattgtttttttgtatttatttgtttagtaatattgttaattttgtaagaattagttttatgttttgttttgtatagggttggttgtttttttttttagattatgttttttttttttattttttttttttaataatataagtttttggtttttttttttttaagagttttttgtattatggacggaagttttgggtttatgtttgttttatttattttttggagtattttagggatttgtttttgttatgtttgtgttttagggttttttattaattttagtattcggtagataaatgatagatatttgttgaattaagttgtgagttggagatttttgtagaattattattgttttttttaatttggaattttttatttagagtgttttttttaagatgatgaggtgttagattttagtggtttgagttttttgaaagtagagattttgagaaagaagattagttattaagattatattaaaaagatgtgtttttgtgttaaagattttatttataaataggtaatattattatttttattttatagaagggaggtttaagttttataattttagtcgtaaagttgggattttaagattggttatttgattttgagttagatataattatattttggtttttagggatattatagaggtttggtatggtattagggtatggtttagtgtattggggtatgtttaataggattcgtagggggtagtgatgagtttttttgtttggattggggataaatttgtagttattttttttttaattaaagaggaagtgggaatttaaaaaagattttttgtcgggtacggtggtttatgtttgtaattttagtattttgggaggtcgaggtaggtgaattatttgaggtcgggagttcgagattagtttgattaatatggagaaattttatttttattaaaaatataaaattagtcgggtgtagtggtatatgtttgtaattttagtcgttcgggaagttgaggtaggagaattgttggaatttgggaggcggagattgtagtgagttgagatcgcgtttagtttgggtaataagaataaaatttcgttttaaataaataaataaaagtaaaaaagatttttaggtcgggtgtggtggttttcgtttgtaattttagtattttgagaggttaaggcgggcggattatttgaggttaggagtgtttggttaatatagtgaaattttgtttttattaaaattataaaaattagtcgggtatggtggtgggtttttgtaattttagttatttaggaatttgaggtaagagaattgtttgaatttgggaggcggaggttgtagtgagttaagattacgttattgtattttagtttgggtaatagagttaaatttagttttaaaaaaaaaaaaaaaaaaaaagatttttatatagttttttttttagaggtttagggatgtggatttgtgagggttgttgtaaatgcgtagttttttattttttgggatatttgttgtttttttgttttgttttgtttgttgttttttttattttgttttgttttttgtttttgtttgttttttgcgaaattggtgagttattaattaatttttatttaatatagttttatttttttttttttagggtatagagattgtattgaggggagggtaggagagagtaacgtgtaagtgggaaaattgatttaaaatattttgttttataattttaggatagaaaatggatagtgtaagtgatttagagatttggttaatgtgtttttgttaaatatatttatttttaagaaagttagtattgttaggtatagtggtttacgtttgtaattttagtattttgggaggtcgaggcgggtggattataaggttaggagtttaagattagtttggttaagatgatgaaaatttgtttttattaaaaaatataaaaattagttgggtgtggtggtgggtatttgtaattttagttattcgggaggttgaggtagagaattgtttgaatttaggaggcggaggttgtagtgagtcgagattatggtattttattttagtttgagtaatagagtaagattttattttaaaaaaaaaaaaaaaaaagaaagaaagttattatttaattaaaggagtaaggaaaaaaaaaggaagggggaatttttttttagattaattttttttttttgaatttaattttattttttttggtgttaatagatgaggtttataattttttttataaaatatgtagttaaatatttgaggatatttagggatttggatttggtggtaggagattaatataaattaagataaggaagaagttaaagaaatgaattaagtagattttttgggatataaggtagggggattggggggttggatagtgtagagtatggtattggtttaaggtattgaggattattttttttttatatttattagagaaggtttaggttttcgagttaatagggtatttatcgtttggggcgtttgagttattaggatattgttaggagatatagaattttagatgttttgtagaattttttttgttacggtttttttttttgaaatattttttattgtaatatttttaggaaaggaagggggttggttcggaggaagagaggtggggaggtgattagggtttatagaggagggaattgaatgatattttaggattatataaattgttagaggtagtcgaagagtttataagtgtgaagtttggaagtcggcgggtgtcgttgtgtaggaaagaacgtaaagtatttttagagtttgttcggagtttagaggttcggaagatttatcgattatggtgagtgtagggttttggggtcgaacgcgtgttattcgggagttataggggttggatggggttttttagatttttgttttttttttagg

SEQ ID NO: 12 - DNA, 5216 bp, Artificial Sequence
  chemically treated genomic DNA (Homo sapiens)
tttggggagagagtagaggtttaggaggttttatttaatttttgtggttttcgagtggtacgcgttcgattttaagattttatatttattatggtcgataagtttttcgaatttttgagtttcggataggttttggaagtgttttacgtttttttttatatagcggtattcgtcggtttttaggttttatatttgtgaatttttcggttgtttttgatagtttatgtaattttgggatgttatttagtttttttttttgtgaattttgattatttttttattttttttttttcgagttagtttttttttttttttggaaatattgtaatgaaggatgttttagggagggggatcgtaataggaaggattttgtagggtatttagggttttgtgttttttggtagtgttttgatgatttaggcgttttaggcggtgaatgttttgttgattcgggagtttaagttttttttggtgggtgtgggaaaaggatgatttttagtgttttaggttagtattatattttgtattatttaattttttaatttttttattttatattttagagaatttatttgatttatttttttgattttttttttgttttggtttatgttgattttttgttattaaatttaagtttttgaatatttttagatatttaattgtatgttttgtggaagagattgtgaattttatttgttggtattaaggggggtagaattaggtttaagaaaaggaagttggtttaaagaaaaattttttttttttttttttttttttgtttttttgattaagtaataatttttttttttttttttttttttttttgagatagagttttgttttgttgtttaggttggagtagagtgttatgatttcggtttattgtaattttcgttttttgggtttaagtaattttttgttttagtttttcgagtagttgggattataagtgtttattattatatttagttaatttttgtattttttagtagagataggtttttattattttggttaggttggttttgaatttttgattttgtgatttattcgtttcggttttttaaagtgttgggattataggcgtgagttattgtgtttggtagtattaatttttttaaaagtggatgtatttaatagagatatattggttaagtttttgggttatttatattatttattttttgttttgaaattgtgaagtaaggtattttgaattagtttttttatttgtacgttgtttttttttgttttttttttagtataatttttgtgttttaggaaggaagggatgggattatgttgaatgaggattaattagtaatttattagtttcgtaaaaaatagataaaaatagaaaataaaataaaatgaaaaaaatagtaaataaaataaaataaaaaaataataaatgttttagagaataaggagttacgtatttataatagtttttataggtttatatttttagatttttggggaaagaattatatgaaagtttttttttttttttttttttttgagattgagtttggttttgttgtttaggttggagtgtagtggcgtgattttggtttattgtaattttcgttttttaagtttaagtaatttttttgttttagatttttgagtagttgggattataggagtttattattatgttcggttaatttttgtagttttagtagagatagagttttattatgttgattaggtatttttgattttaggtgattcgttcgttttggttttttaaagtgttgggattataggcgagagttattatattcggtttgaaagttttttttatttttatttatttatttgagacggagttttgtttttgttgtttaggttgggcgcgattttagtttattgtaattttcgttttttaggttttagtaatttttttgttttagtttttcgagcggttgggattataggtatgtgttattatattcggttaattttgtatttttagtagagatggggtttttttatgttggttaggttggtttcgaattttcgattttaggtgatttatttgtttcggttttttaaagtgttgggattataggtatgagttatcgtgttcggtagaaagttttttttaaatttttattttttttttaattgagaaagaagtagttgtagatttgtttttaatttaaataagaaggtttattattgttttttgcgggttttgttgggtatattttaatgtattgggttatgttttggtgttatgttaggtttttgtgatatttttgaggattaagatatgattatatttgatttaaagttagatagttagttttggaattttagttttacgattgaggttatgagatttgggttttttttttgtaaaatggagatgatagtattatttgtttgtgagtaaagtttttggtatagaaatatatttttttagtgtggttttgatgattagtttttttttttagagtttttgtttttagagaatttaggttattgaagtttgatattttattattttaggggaggtattttgggtggggagttttaagttaagaggggtagtgatggttttgtaaagatttttaatttatagtttgatttaataaatgtttattatttgtttatcgagtattagggttggtagaaagttttgggatatagatatgataaagataagtttttgaagtgttttaggaggtgggtagagtaaatatgaatttagaattttcgtttatagtgtagagggtttttaaaagaagagaaattaaaggtttgtgttgttgggggagaggggtggaggggaggaatatggtttggagaaaggaatagttagttttgtataagataggatatggggttggtttttatagggttaatagtgttgttagataggtagatatagaaaggtaatttgggtagttgtagttgtttgagtagatattgggtagaatatagtttttggttgggaattttttttattttttttatttggagtatatgtgggttttgttgttgttgttattgttgttgttttagatggagttttatttttgttgtttaggttggagtgtaatgatgtaattttggtttatcgtaatttttattttttgggtttaagcgagttttttgttttagttttttgagtagttgggattataagtacgtgttattatatttggttaattttgtatttttagtagagacggggttttattatgttggttatgttggtttcgaatttttgattttaggtgatttatttgtttttattttttaaagtgttgggattataggtatgagttattttgttgggttaagtgtgggttttagaagttagtttgggttaggtgtagtggtttatgttagtaattttagtattttgggaggttaagttgaaaggattatttaaggttgagttttaggttgtgataagttatgattgtattattgtattgtagcgtgggtaatcgagtaagattttggtttaaaaaaaaaaataaataaataaaataaaaataaaaaagttttttttggggaaataagaaaataaattttttttaattaaaaaattaaaaaaagaagttagatagttgtatgaggaagggtttaagatttaggttttatttttggttagagtatggtgtatagtaggtatttagtaaatggttttttaggggttggatggatattgggagagaagatatggaggatggaatgatggtttgtagatattttaatatgttgttttgtggaagagattgtagattttattgattaattttaaggggtagaattaagtttaagggaaagaaattggttttaagaataattttttttttagatttgtatttaattgaatttttgtttaagttatatggttttttaaaaattagaggttttttgtaaaaatttttaggtgttatcgggattttaattttttggagttgttaagggggtttgggaggagataatattaaataattatattataatttaatgatagttgtgaaaagggttgtgaagaagttgggttattggtataatggttttgagtaggtgatattggatttgatatgttgagaatggtgttgagggaaggatgttggtagaaagaaaagggaaggatgtaggtagagaaaatagtttgtgcgagagttttttttaagagtgggagtagggtggaggagaaaaagaatagggtttgttgataaagagaaggttttagaagaggtgagtttagattggagaggtatgtaggggttagattatgtagggttaagtcggttataattttaattttgaatgtgaggaatacggttttttatttattagtgtttttttagtgtttagtagattagtggtattttatatttggtgaaagattttattttaaaaattatgggaatttagttttatgtagagaagtgaaataatgatattttttttatttttattatatataaaatgagaataatggttattgtggtgaatattttgtaaagtaaaaataaaattttaaggtcgttttttataattatttgaatggattttttttttagttagggtttttttaaaattaaattcgagtgatcgttttaggttatgatgggaagtaggggttgaacgtgttttattatatttttttatcgttaatattaatatagattttaagtttgataagaaatattttataatttattttttttgaagtttaggatttgaaggttttttttgtaaataagaatttgggtttttataattttttattttaatttagatatttttttttattgattttaggtttttagagaaatttaattaattgttaattagaaaaatttaaaatttatttataagttggaagttttttatcgttttatttcgagttgtttcgtttttttgttgttttataaattaatgttttttttttttttttttttttttttttttttttttttttttttttttttttttttttttttttttttttttttttttttttttttttttttttttttttttttttttttttttttttttttaggaataacgtttaaaattttaagggaaattgaatattcgaataaaggattattagtaaagtaattttatttttgtttagaggggtgtttgtttggttagtcgttatgagagtatatttgaataaaggggtacgagagtttttatttttgacgtaagttttgtttttgtat

SEQ ID NO: 13 - DNA, 4428 bp, Artificial Sequence
  chemically treated genomic DNA (Homo sapiens)
tttgttttgtcgggttgtgtttgggttcggtttttgcgggttgtggtgtttgtgtgttttttttttgttgtgtttattgttttgtgcggtgtcggtgcgttggtcgttgcgtttggtttttcgttgggtgggtgtttttttttttgttttttttttgtcgttgtgttatgttttttttgttttgttttttgtttttgttttttttcgtttttttttttttttttttttttttttttcgtttttttttttttttcgttttttttttttttttttttttttttttttttcgttttacgttagattcggtttcggttttcgttttttttttttttttttgttttaagttatttttatttttgttttggtcgttttagggtattttgaaaggattaggatatgcggttgcgtttttggttttttatttggtttttgttgggatttattagttattagtttatttttgtgagtagacgttggattcgcggggtttttttttttttattgggttgtgttacgcggtatgaaattatatagtttaggtttgtaattttagtattttagggggtcgaggtgggtagattatttgagtttaggagttgaagattagttagggtattatggcgaaattttatttttataaaaaattttaaaaaagattagtcgggtttggtggtgcgtatttgttattttagttattggagaggttgaggtgggaggatcgtttgggtcgaggagttggacgttgtagtgagttgagatggtttcgttgtatttttgtttttaataaataaaatggattaaaataaagtgaaatgttatttgatttgtgttatttggtttgatgatttttttttttttttttttagatagagttttattttgtcgtttaggttggagtgtagtggtaagatttcggtttattgtaattttcgttttcggggtttaagtaattgttttgttttagttttttgagtagtttagattataacgtttggttaatttttgtatttttagtagagacggggttttattatgttcgttaggatagtttttattttttgatttcgtgattcgtttgtttcggttttttagtgtcgggattataggcgtgagttatcgcgtttggttaaaatatataattttaagtgtaagtttattaattttggaaagtatttatattagtataaatcgatttttttttaagatttatattattttatttatttatttatttatttgagatagttttttttttgttgtttaggttggagtgtaatggggtaatattagtttatcgtaatttttgttttttaggtttgagcgatttttttgttttagtttttcgggtggttgggattatagatatgtgttattatttttagttaattttgtatttttagtagagatagggtttttttatgttggttaggttggttttgaattttcgattttaggtgattcgttcgtttcggttttttaaagtgttgggattataggcgtgaattatcgtgtttagttaagatttatattattatgttattttagaaagtgaatttttattttttttagttagttttttttttattataggttagtttgtttattttggaatttcgcgtatatagatgcgtgttatgttataggtatttttttgtgtttgttttattttgtttaatattatgtttttgaaattattattattgttgtatggttttttaattttattatttttattttagatttagtatatgttgagtttaatttgttgaagggttatttttgtttaatttattattttgaaagaaatatttaaaattgagatgtttttaagaatatatagttaaattttgaggaatcgatgtagaaatgttattataagttgtttgaatttatttaggggaagttttcgtttttatttatataagagtttattggaattaatattaataattttagagaaattttatattatttatgttatttttatgatttttattttggtaattttttttttttttgagatagagtttcgttttgttatttaggttgaagtgtagtggtgcgatttcggtttattgtaatttttatttttttgattttttcgttttagttttttaagtagttgggattataggtatgtgttattatatttagttaattttttgtatttttggtagagatgggttttgttatattgtttaggttggtttttaatttttgagtataagtaatttgtttgttttggttttataaagtgttgggaggtgtgagttatttcgtttggtttgagatatatttttttaaataataatatatagatttttgaagtattggggggtatagggaaggtttttttgaagaagtattatttgaattgagatttaagtgatgaaaagaattagtttagtaaagaattagagtttttagtagagatttaggaaaaagggttgtaagtgtaagggttttgaggtagggaagtatttggtaaggagagtggtggaggtacgaggtggaaaatgtaggtaggttagtaatattcggtttattaggttttgggttggagtttttattttagttagatgaaaagtaattgatattttttgttttttaaaaaatttttatagagatgggttttcgttgtgttgtataggttggttttaaatttttgtttttaaaggattttttcgtttcggttttttaaagtattgggattataggtatgagtttttgtgtttggttgtaattgatatgttttaagtaggggaatgatatgttttagtgaaagttagtttgggtagttgggtagttaatgaggggattagagagattttgttgaatgaaaggtagattgagttttgttattcgttttttttatttttttttatttatgttttattttttcgttttttagtcgttttaattggttaaagggaagtggaggttttgttatttgtagggagggttttttggggtttgtttatagtaaataggaagttatagtttggtgagatgggtttgggaattagttattgagaaagtgggttttttgggtttttgaattttttttttgagtttttgtagtagtgaaaaagatatagaggtatatagagagtgatagagaaagagagagatagagaggagaggtatggggtagaataagaatagatttaggagttagaatttttgggtttttttaaaataattttttttttagagatagggttttgttgtgttgttcggattggagtatagtggttatttttaggtataattatggtgtattgtagttttgaatttttgggtttaagcgatttttttattttagttttttaaggatttgggattataggcgtgtattattgtgtttggtttttgtttggttttaaattgaggtagtatgatttgagtttttaggtattaattgaagttgtattttattaattgagggtttatgatgtgttggatattgggttaatagtgttgaatatattgttatttttaatttttataaataatatttgtataggattgttttttttttttttttttttttgaaatagagttttattttggtgtttaggttggagtgtagtggtgtgatttcggtttattgtaattttcgttttttggtttttagtgatttttttgttttagttttttaagtagttgggattataggtgtgcgttattatgttcggttaatttttttttttttttttgagaaggagtttatgtgtttagtattgttttagagtatttgtaattagtggtgaataatacggtttttattttaaggggtttatatttttgtgtagaaaatagaaatgaataaataaatatataagattatttttcgtggtagtgagagttgggatgaaaataaaatagcgtggtagggaggaggtaagtgttgtgagtttggagggtttttggagaatggggtttgaggcgtgattatcgtttttttttttggggggattgtttgtcgttttcgtagatatttatggttgagtgttttttaggtttttgtttgttttagtattttttgcgcgaagttgggtgtttcggagagtttgattattatgttattttttcgtttttttttttttttttttttttttatttttatggaagttaggttcgaggaatttttagtggtgaaggtggaaggtatgtttaaagggtagaaagggaagggattgaggttggaaatttgagttgtggttgggtgtttttggttgagtaatttattttttttgagtttttatttttttatttgtaaaatttaggaaagggttggaaggattttgtcggtttttttatttttagtttttggagttttttgttttataatttggtgtgaggagtcggggggtttggaggttttttttatttatgtttatatttttttttttttttttttataga

SEQ ID NO: 14 - DNA, 4428 bp, Artificial Sequence
  chemically treated genomic DNA (Homo sapiens)
tttgtggagagagagggagagaggtgtgggtatgggtgggggggatttttaagtttttcgattttttatattaggttatagagtagaggattttaaaagttgggagtggaggagtcggtagagtttttttaatttttttttgaattttataaataagaaaatggaggtttagagagggtaagttatttagttaaggatatttagttataatttaagtttttagttttaattttttttttttttgttttttggatatattttttatttttattattagaggtttttcgggtttgatttttatgggggtgaggaagaggaggaagaagaggaggcgaggaggtggtatggtggttagatttttcggggtatttagtttcgcgtaggggatgttggggtaggtaggggtttggagggtatttaattatgggtgtttgcgggggcggtaggtagtttttttagagaggaaggcggtggttacgttttaggttttattttttaggaattttttagatttataatatttgttttttttttgttacgttgttttatttttattttagtttttattattacgggaaatgattttgtgtgtttatttgtttatttttgttttttgtataagaatgtgagttttttggagtagagatcgtgttgtttattattaattgtaagtgttttagaataatgttgggtatatagatttttttttaaaaaaaaaaaaaaaaattagtcgggtatggtggcgtatatttgtaattttagttatttaggaggttgaggtaggagaattattggaaattaggaggcggaggttgtagtgagtcgagattatattattgtattttagtttgggtattagagtgagattttgttttaaaaaaaaaaaagaaaagaaaatagttttatataaatattgtttgtgaagattaaaaatgataatatgtttagtattattagtttagtgtttagtatattataagtttttagttaatgagatatagttttaattaatgtttaagagtttaagttatattgttttagtttaaaattaggtaaaagttaggtatagtggtatacgtttatggttttaggtttttgggaggttgaggtagaaggatcgtttgagtttaggagtttaaggttgtagtgtattatgattatgtttgggaatagttattgtgttttagttcgggtaatataataagattttgtttttaaaagaaaaattgttttaaaagaatttaggagttttaatttttaaatttgtttttattttgttttatgttttttttttttgtttttttttttttttgttattttttatgtgtttttgtgttttttttattgttgtagggatttagaaaaagaatttagggatttaagagatttatttttttagtggttgatttttaggtttattttattaggttgtgattttttgtttgttgtgggtaagttttaggggattttttttataggtggtagggtttttatttttttttggttagttgaggcggttgggaggcggaagaatgaggtatgaatgaaggggaatgaagggggcgagtagtaggatttaatttgttttttatttaataaaatttttttaatttttttattagttatttagttgtttagattggtttttattagagtatgttatttttttgtttaaaatatgttagttatagttaggtatagaggtttatgtttgtaattttaatattttaggaggtcgaggcgagaggattttttgaggataggaatttgagattagtttgtgtaatatagcgagaatttatttttatagaaattttttaaaaaataaaaaatgttagttgttttttatttagttaaaataaaaattttaatttaaggtttagtaggtcgagtgttgttgatttatttatattttttatttcgtgtttttattattttttttgttaagtgtttttttgttttagggtttttgtatttgtagtttttttttttggatttttgttgggggttttggttttttgttggattggttttttttattatttaggttttagtttaaatggtatttttttaaagaggttttttttgtgttttttagtgttttaaaaatttatatattattatttaaaaaaatatattttaggttaggcgaggtgatttatattttttagtattttgtggggttaaggtaggtagattgtttgtgtttaggagttggagattagtttgggtaatatggtaaaatttatttttattaaaaatataaaaaattagttgggtgtggtggtatatgtttgtggttttagttatttgggaggttgaggcgggaggattagggggatggaggttgtagtgagtcgagatcgtattattgtattttagtttgggtgatagagcgagattttgttttaaaaaaaaaaaaaattattaaggtggagattatgaaaatggtatgaatagtgtgggatttttttaagattgttgatattaattttagtagatttttatgtgagtgaagacgaagattttttttgagtaagtttagatagtttgtgataatatttttatatcgattttttaggatttaattatatatttttgaaaatattttaattttaaatgttttttttaagatggtgaattaaatagagatagttttttaataggttgaatttagtatatgttgagtttgaaatggaaatgatggagttagagaattatataataatggtaatgattttagaaatatggtgttgagtagaataaagtagatataaaagagtatttatggtatggtacgtatttgtatacgcgaaattttagaataagtaagttaatttatgataagaaagagattggttgggaagagtgagagtttattttttggggtgatataatagtgtagattttggttgggtacggtggtttacgtttgtaattttaatattttgggaggtcgaggcgggcggattatttgaggtcgggagtttaaaattagtttgattaatatggagaaattttatttttattaaaaatataaaattagttgggagtggtggtatatgtttgtaattttagttattcgggaggttgaggtaggagaatcgtttaaatttgggaagtagaggttgcggtgagttgatattgttttattgtattttagtttgggtaataagggagaaattgttttaaataaataaataaataaataaaataatgtagattttgaaagggggtcggtttatgttggtgtaagtattttttaaagttagtaaatttatatttaaggttatatattttggttaggcgcggtggtttacgtttgtaatttcggtattgggaggtcgaggtaggcggattacgaggttaagagatggagattattttggcgaatatggtgaaatttcgtttttgttaaaaatataaaaattagttaggcgttgtaatttgagttatttaggaggttgaggtaggataattgtttgaatttcggaagcggaggttgtagtgagtcgagattttgttattgtattttagtttgggcgatagagtgagattttgtttaaaaaaaaaaaaaaaaaagttattaaattagatgatataaattaaatgatattttattttgttttggtttattttgtttgttagagataagagtgtagcggggttattttagtttattgtaacgtttagtttttcggtttaagcgatttttttattttagtttttttagtaattgggataataggtacgtattattaggttcgattaattttttttggaattttttgtagagatggggtttcgttatgatgttttggttagtttttaatttttggatttaagtgatttgtttatttcggttttttaaagtgttgggattataggtttgagttgtgtaattttatgtcgcgtgatatagtttagtaaaaaggaagaaatttcgcgggtttagcgtttatttataggggtgggttgatggttgataaattttagtaggagttaaatgaggagttaaaagcgtagtcgtatgttttgatttttttagggtgttttgaggcggttaggatagaggtggaggtggtttagggtaggggggagggaaggggacggggatcggggtcggatttgacgtggggcgggggaggggagggggaggggaaggggagggggcggggaaggggagggggcggggaaagggaaaggggagagggaaagggacgagaggggatagggataggagataggataagaaggatataatataacgataaaagaggaataaggggaaagatatttatttaacgaagagttagacgtaacgattaacgtatcggtatcgtataaaataataagtataataaaaagaagatatataagtattataattcgtaaaaatcgaatttagatataattcgataagataag

SEQ ID NO: 15 - DNA, 5525 bp, Artificial Sequence
  chemically treated genomic DNA (Homo sapiens)
atttttttttatggtaattgggattagattgttttatttttcgatatttttgtaagatttttttatgaatattttgatatttttttgagtttggagaaaggcgttttttttgtgtatttagtttgataaattttttagttatagtttttattttggtatgtaaagttttgtatttattatattttgtattgacgttatttttataatttcggcgttgtttataggagatgatagtaatatattttattaaataatttgggagtttaattgttgaaggttttatggaggtagtgtaattttttttagtttttttattggaatttggattggagttatttagtttggtaattttttttttttttttaagatttttttttttttttttaatagttttaatgtcgtgtttttttatttggtttttttttttatgttttttagatttttttttggattttttgtgagatattgaatggtttttttttataggttttggatattttaatagaattgaattagggggtaaggtttttagagaagttttagaggtatatttgttttgttggtttttatagatattattgttttgattaaaattgttaataggtaggttttgagttttcggttttttggagtgttaggggaattggagttagaatttataatttgaggaggatgtgaaatcggtagatgggttgaaggtaagcggtggaggggtggggatggtagtagttgtagggggtagagggaggtttgtagtagattttttattggtgggatttaaatgattatttagtgttggtggtattttgttcgttaggtgagatattcgggtttttttatttattaaatgattaataaattttgaatttaaaagtcgtgtttgaggagaagatatagcgtttttattagaatatattggagattttgaacggttggtgtttgtagtattttgagatggatttagttttttagagagtattgattttaatgattaagtgtttattttattgtatttaggttagtttttttgaagttttttaaaaatataattttttgaagtatacgagaggtttttaggatttagattggttatttgttgtagaattgtttttagggagtttttgtttttttgattgatattatttttttggagtttagtaagtagtttcggttttttgtaggtttttagggttagtaagtgaattattttgtttttgtatggtttttgagagacgttgttgttgttgtgtgtttatcgaattggatttgtagggtttatgggggttgattttttttttttaggaattgtatttgaaatagtttgaggtgtttttcgaatttgtatttttttttttatatatggtttatcgggtttgataatttttgtgtttcggttgcgggattttttttttgtttgggtcgttttttttcgtgttatttgattcgagtcgtttgttgtatatattgtaattttattttgtataaattttaggtaattgagttgggaggttttagagttggagaatgtttgttggacgtagttaaagttgttttgagggttgtttttgtttatatttgataaataaaagttaaagttatgaattttattgaggggattatttttgggaattttgataagtttttggagtttttggaattgaattgaaggtcgaaaagaaattaaatttttgtggttttggtaagtttggagcgtttggatcgtcgattcggtgagttttatatgtagtacggtgatgttgttttgttttagtcgttcgtattagagtttatagcgttgtttcgcgatttttttattttcgatattttaaatttttagaggtgtcgtcgtcgttagtttagttttagtttttattgcggtcgtagttatttgggtttttgtagtcgtcgttattgttagggttatttcgttgttggcgtattgttatatattgcgcggagttagatttcggattgttatcgtcgttatttgttttattttttggtttcgcgtttcgttttaggttagttttattggtttagtttttttagaatcgtttttatcggtcgttttttatttttacgggggcggggtttaaagtcgttggagttttgtttttgggattggacgttcgagaggtaagagagttattataaggttttttaatttttatgttttttttagtggatttttaggttattgtggtttgtattattaggttatttataaaaatgaatatttttttaaattaggttattttatagtaaattacggtttttgattattattatgttttgaataaagattatgagtaattgtatttgaatgttgttgaattttattgattgaattttgaattgtttgattttgattaggttggtttgtggaaagtgttattaagaagagttttttagttcgttggtattatttttttgatagttattataaaagtttttttgatgtatttttttaagaattttaaatttttatatgtagttattttttgtatattaaatggtttttttatggttaggataataaaaatatgaagaaagtatataagattttaattaatttgacgttgtgaattgtgaattttgaattgaaattaagtaagttttttatgattaggttttaaggttttggttagttttttaaaattgagaggttgaaattttttgattaaaattaatatatttgttttttttttttagtttttggaaattattattttaattttgtttttataaaatagtaaattattttagagtttatatataagtgagattatgtagtatttatcgtgggtttattttaaggttttgagtaaattattatttttttgtgttagggtattttgagttagttttgttataaattattttgtttaggtaatatattgtaaaacgttttataatttaatggttttttttttagaaaaaaagtagtgaaagttttaatagttaaaaagtgtttaatttaattgatttttgggaaaaaatattcgtataattttagatagttttaatttttgaaggtaatatagtttggtttttgttgataaataaataaaaataaaaaaattatatatatatatatataaattagttttttgtttttaagtgtgtaagaatgttagtatttaaaatttttaagatatataaaaattaaatagaattgtttaagtttttaaagggagtttggaaatttgaagaaagtaaagttaaaaatattgttttatgagttatataattatttttttttttattttttatagttttttttttatttattatttaggtaattttgtatttaaatttaataatttaatattttatttgttataagaatacgttattatgttattttaagtttttttgggtaaattatatataattagataggttgggttagggttgtttataagattttagtttagagtgtggtgtagtagtttattttttttaggatttttgttgtaataggatatgggagaagggaaatattaacgttagtagaatgggaggaattagattatggagatatgatttttgttttttggtatttttttagttgatttagaagaggatatagagggagatagatatatggttatttttataattataaattttgttatatgttgagaggatggttttttaaagttagttagtgtataagtagtggaggttgggattgttttattttttttgtttagggttatatagtttggtagatttggaaagatttttttgagaaagtgattttggaattgatattttagtggaaataattaggtattgggagggggtgaggtgaggagaaggttaagaatttttatgtagagggaattttgtgtagagattttagttaggaagaggttttgtatagtggaggaattgaaagttaatagttaggttatagtatagagtaaatgatgttggggtgtgaggtgatgttaaaaggtagatattagggttagagggcgtataattttgtaggtcgtgttaatgattttgttttttatttaagaatgttattttaggagattagttaaaaggttagggtgatggtgacggtggaaatatagaaaaaggaatttatttaagaggtatttaaaaagaagtgaaatagagatgagttggagatagattggataaaaagagtgagggagagggaggtgttaggttgtagtttaggttttgagttgttaaagaggagtttttttttttaggtgagttaaggtttagaattacgatttttggttatttttttttatttttagtgtgagaagtggcgagttggttgtttaggtatatattgttattttatatttattgtttaagatagaggcgtatatttggaaagtgaatgagttaggagttagaggagaaggtatgtcggtagaggttagggcggagaggaggaagagagtttgggggcgcgtttttaaaaaggagttagggaagatagagtagaggtcggggaggggagagtaaggattatgataggaggaaagagaggttagggaatattgaggtggaggaattttgggatatgatagttgtaaagaattgtagttaatttaatttagtttttttaatgtgtaattgaggaaattaatttttatgcgtttattttattgtaaatgtggtatttgtatttgagaaattttggaaaatataaagatgtaaagtaaattaagattatttatagtttttttatttagagatatgtattgttaaagtaaggattttgatttttttttttttttgtatttttattatggttggaattgtaatatagacgtaattttatgttttgtttttaaaatataaataatggttgtaaagcgttttatacgttgatttaaagttttttttgaaataggaaattgagatacgtcggttgtgaaatttattgaagtgagcggcggcgttaggatttttgggatttcgatttttttgtagttcgtatagttaagggcgagggcgtttttcggtagaagtagtaaatcgtcggtaagtttagcgaggagggttgtcggggtttgggtttgggaattggttggtatttagcggaaagggacgtgagttgagcggcgggggagaagagtgcgtaggttagaaggcggcgcgtagcggcgtttcgcgaggtttttacgtcgggcgatatggggtgtttgttgtttttgttgttttgggcgtttttttaggtttggggaagcgttgaaggtgggtggaacgagggcgtttgagtgtattcgcgggagggcggagagagggagttgggtagggacggggagggtaacgtttgatggggattggtgagattcgggacgtattggcgcgatttaggtagaaaattcgttgttttttggtttcggggagaggtagcgcggtatagagttcgttggtattagtcgttttttgaagtttatttttttttgttttttttttttttttttttatgttggttgttttttcggttatttgttacgcgtttttaatttttatttttttttagt

SEQ ID NO: 16 - DNA, 5525 bp, Artificial Sequence
  chemically treated genomic DNA (Homo sapiens)
attgggagagaatgaagattggaggcgcgtagtaagtggtcgggagagtagttagtataaagagaaggaagaaagaaataagaggagatgagttttaggaggcggttgatgttagcgaattttgtgtcgcgttgttttttttcggagttagggagtagcgagttttttatttagatcgcgttagtgcgtttcgggttttattagtttttattaggcgttgtttttttcgtttttatttagtttttttttttcgttttttcgcgagtgtatttaagcgttttcgttttatttatttttagcgtttttttaagtttggaggagcgtttagagtagtagaaatagtaggtattttatatcgttcggcgtggggatttcgcggagcgtcgttgcgcgtcgttttttgatttgcgtatttttttttttcgtcgtttagtttacgttttttttcgttgggtgttagttaatttttaagtttagatttcggtagtttttttcgttgggtttgtcggcggtttgttgtttttgtcgaagggcgttttcgtttttagttgtgcgagttgtaaagaggtcggggttttaggaattttggcgtcgtcgtttattttagtaggttttataatcggcgtgttttaattttttgttttaaaggagattttgggttaacgtgtgggacgttttataattattatttatgttttggaagtaggatataaggttgcgtttgtgttataattttaattatggtaaaaatgtaaagggaaaaaaggattaaagtttttgttttagtagtatatgtttttaggtggaaagattatgagtgattttaatttgttttatatttttatgttttttaaaattttttaagtgtaagtattatatttataataaagtaaacgtatgaaaattaatttttttagttgtatattgagagaattggattaggttggttataattttttataattgttatattttaggatttttttattttagtgttttttagtttttttttttttttgttatggtttttgttttttttttttcggtttttgttttgttttttttgatttttttttggggacgcgtttttagattttttttttttttttcgttttagtttttgtcggtatatttttttttttggtttttgatttatttattttttaaatatgcgtttttgttttaaataataagtgtaagatgatagtgtgtatttggatagttaattcgttattttttatattgaaaataagaaaaagtgattaaaaatcgtggttttaagttttagtttatttggaggaaaagatttttttttggtaatttagaatttgggttgtagtttgatattttttttttttttattttttttatttaatttatttttaatttatttttattttatttttttttgaatattttttgaataaatttttttttttatatttttatcgttattattattttaattttttgattgattttttgaagtagtatttttgggtagaaaataaaattattagtacggtttgtaagattatgcgttttttagttttggtgtttattttttgatattattttatattttagtattatttgttttgtattgtagtttggttgttagtttttagtttttttattatgtaaaatttttttttgattaaggtttttgtataaagttttttttatatgaaagtttttgattttttttttattttatttttttttaatgtttagttatttttattaaggtattagttttaaggttatttttttagggaagtttttttagatttgttagattgtgtgattttaggtaggagaagtagggtagttttaatttttattgtttgtatattaattggttttgagaagttatttttttagtatgtagtagagtttataattatagaaatggttatatgtttgtttttttttgtgtttttttttaaattagttggagaggtgttagaaggtaaggattatgtttttataatttgattttttttattttgttaacgttaatgtttttttttttttatattttgttgtagtaagagttttagagaaaataggttattgtattatattttaggttgggattttgtagatagttttaatttagtttatttaattatgtgtaatttgtttaaaaaagtttaaaataatatagtaacgtgtttttgtaataaataaggtgttaaattattaaatttggatataaaattgtttaaataatggataggagggaaattatgagaaataaaaagaaaaataattatatgatttatggggtaatatttttaattttattttttttaaatttttaagttttttttaaaaatttgaatagttttgtttagtttttgtgtattttaaaaattttaagtgttaatatttttgtatatttaaagataagaagttggtttgtgtgtgtgtgtgtgtggtttttttgtttttgtttgtttattaatagaggttaggttatattatttttagaagttaggattatttggaattatacggatatttttttttaaaggttagttgagttagatattttttggttattggaatttttattgttttttttttgggaaaggaattattgaattatgaaacgttttgtaatatgttatttaaataaaatagtttataataagattgatttagaatattttagtatagagagatggtgatttatttagagttttaaaataagtttacggtgggtattatatgattttatttatatgtggattttaaaatagtttattattttatggaaatagagttagggtagtggtttttaggagttggagggaaggggtaaatgtgttaattttggttaaagggttttagttttttaattttgagaggttgattaaaattttggagtttgattataagggatttatttggttttagtttagaatttataatttataacgttaaattagttggaattttatatgttttttttatgtttttgttattttaattataaggagattatttaatgtataaaggatagttgtatatgagaatttaagatttttgagaggatatattagggaaatttttataatagttattaggaggataatattaacgaattaaagaattttttttaatagtattttttataagttaatttgattaaaattaaataatttaaagtttagttaataaagtttaatagtatttaagtgtaattgtttatagtttttatttagagtataatggtgattaaggatcgtagtttgttgtaaaatggtttgatttaaagaggtatttatttttgtaagtagtttgataatataaattatagtaatttggagatttattaaaagaaatataaggattagaaaattttgtgatagtttttttatttttcggacgtttagttttaggagtaaaattttagcgattttgggtttcgttttcgtgaaagtggaaggcggtcgatgaggacggttttgagggaattagattaatgagattagtttggggcggggcgcggggttagagggtggggtaggtggcggcgatggtagttcgaggtttggtttcgcgtagtatatgatagtacgttagtagcgggatggttttagtagtggcggcggttgtagaagtttaagtagttgcggtcgtagtggaggttggagttggattggcggcggcggtatttttgggagtttaagatgtcgggggtgggggggtcgcggggtagcgttatgggttttagtgcggacggttggggtaggataatattatcgtattgtatgtgaagtttatcgagtcggcgatttaggcgttttagatttattagagttataagaatttaattttttttcgatttttaatttagttttaaagattttaggagtttgttaaaatttttaaaaatgatttttttaatgaagtttataattttaatttttatttgttaaatgtgggtaaagataatttttagggtagttttgattgcgtttagtaaatattttttagttttggagttttttagtttaattgtttgggatttatataagataaaattatagtgtgtgtaataaacgattcggattagatgatacgagaaagaacgatttaggtagaggaggaatttcgtaatcgaagtatagaagttattaaattcggtggattatatgtagggaaaagagtgtaaattcggaaagtattttaagttgttttagatatagtttttgagaggaaaaggttaatttttatgaattttgtaaatttaattcgatagatatatagtagtagtagcgttttttagaagttatatagggatagggtggtttatttattggttttgaaggtttataagaaatcggagttatttgttagattttagaaagatggtgttaattaaaaagataggaattttttgggagtaattttgtaataggtagttaatttgaattttaaggatttttcgtatattttaaaggattatgtttttaaagagttttagagagattggtttggatatagtgaaatagatatttggttattggagttaatgttttttagaaaattaaatttattttagaatgttgtaggtattagtcgtttagaatttttagtatgttttagtagaaacgttgtattttttttttagatacggtttttggatttagagtttattgattatttaatggataaaaaagttcgaatattttatttgacgagtagagtattattaatattaaatggttatttgaattttattagtgaaaaatttgttgtaggtttttttttgttttttgtagttgttgttatttttatttttttatcgtttgtttttaatttatttgtcggttttatattttttttagattgtaaattttaattttaatttttttagtattttagaaggtcgggggtttaagatttatttgttgatagttttagttaaaataatagtatttatgagaattaataagataagtatatttttaggatttttttggaaattttattttttggtttagttttattaaagtgtttaaagtttatggaagaaaattatttagtgttttataaaaagtttaaaaagaagtttaaaaaatataaggaaaaggattaaataaaaaagtacgatattgagattattgaggaaaaggagaaagattttaagagagaagaggaaattgttaagttaaataattttagtttaaattttagtggaggagttaaagaggattgtattgtttttatggaatttttagtaattgaatttttagattatttgataaaatatattgttattattttttatgagtaacgtcggaattataaagatgacgttagtgtagagtatgatgagtatagagttttgtatgttaggatggagattgtagttagaagatttattaaattagatgtataaagaaagcgtttttttttaggtttaaaagagtattagaatgtttatgaagaagttttataagaatatcggaagataaagtagtttagttttaattattatgaagaaaaat

SEQ ID NO: 17 - DNA, 5145 bp, Artificial Sequence
  chemically treated genomic DNA (Homo sapiens)
tggtagaagttggttattgttatggtaatagtaaattgatatggtatattggtgagtatgttttatggaaagttgtttttatttatttttgttttagttagtttttaatttggtttagtgtttaagttttatttttagagttaagttttattttttattttagtgttattttaaaatatgtttttttaatatatggtttttttttgagtaaaaggttattatgaattagtagaggtagtaaaagttttaaaaatatggtataatattttttttttgtaaagaaaatttataatttttgaagaaaatagtcgtttgtaaaaggtattttttttttttgtattaggaagaggaggatttttaataatttttattaatggagaaggtattggttttaatttgtataataaattttattaaatatattttgttgtttggtatattttttttggttattgggtaatttgtttttttaatttagaagttttaaatcgttttttttttgtttagtttaatatattttataagtttaagttttaatatttttttgggttatttattattgggtgtttttatgtttatgagggatatatattttaattaattttaatgtgtttttttttttttaatttgtttttttttagtttggtttatagggttttagttagagaatttaagataagaagaggaaaaagattattttttattttttttataattgggatttgtttttgttatattttatagtttgtttatattatgatttatttaattaattttttttttttagatatttaaattgtttttaattttgtttttaaaatattgtagtatataaatttatagttaagtttagtatatagtttttattatttttttatgataaaattatttttgtggatttgttagaaatttataaatgtttgatattttaatttatattgataaattgtttattagaaattatatttatttgtaatttttttggttatatataagaatgtttatttatattattattaatattatgtttttattttttaaatgaagatgaaaaatgtatttatgttaaaattgatatttttttattaataaatagaaataaaattttttttttgtggattgttttttttatgattttgatttattttagttttaaggtgtttattttttttatgtttataagaaaaatttaatattaaaaatttaatgttggttaggtacggtggtttatatttgttattttaatattttgggaggttaaggtgggaggattatttgagtttaggagtttaagatgagtttgggtaatatagtgagatttttcgtttttataaaaaataaaaaaattagttaggtatggtgttatatgtttgtagttttagttatttaggaggttgaagtaggaggattatttgagtttaggaggttaaggttgtagtatgttgtggtgttgtggttatattattgtattttattttgagtaatagagtaagattttgtttttaaaattaaaaaaaaattgttatgtttttgttatgtattttgtaagtaatttgttttttttagtacgttgtttttaatttttttatggttttttatatagaaagtttttatattttatagagttaaatttattgattttttttttttttattgtttttgtttttgaagttatgtttattatttagaattgaattagttttagaggagtaaaattaatgttttaaatagaggaatagaaagttgttttttatatgttttatgaggaaagtgtgaggaagagaggataagcgttttttaaagttgagatgggttagaggatggttggcgttattttttttttattaggttttgatatattggagttggatggtagttggtgggttagttatttataaataggaagttttatgttgtttttttgggttggcgatatttttgaaaaaatacgtgtgttttaagtatttttttttaaaaagatattttttattaataaaaaaggtgtttatttttaaaattttaaattttatagaaataaataaaatgtgaaagaaatataaaattttgggattttaatttattatgttaaaaggaaaaattaagttgaaagttgagttatataagaaattgtttttttttgagtttttaagtagagagttatagataaaaagttgttgtttttacgggtagttattttatgtttattttattttaagaaagtgttaatttattgagtatgagaagaatataaattgattatttttttatttatttttttttttttgtaatatatggatttagtaatgtgattgtatttttttttttttttttttggttagtttttttttttaattgaaggttttgaaataattttgagaaaaaggtataaattatagattttttttgtggttttgtgtttttttttgtttttaatgttgatgaaataaatttttaaattgattgagatttgttttaaattttttttggtttataaaggtaagaagtgaaaattttattttagtttttttataatttaatatttgaaagataagtattgtaaaaaaatttagtattaatttttttaggtttttttttaatatatattttaataataatatagtatgttatggtatattggtatatttatagtatagtataaatatagtattatatataaaaaggattaattttatagatattgttttgtaatgtgttttttttatgtgatttattaaaagtatttttttatgttttatttttaggtttatgttatattattttgatggttatataatattttataatatggatatattataattttagttgtttgtaattttttattataaaaatgttataataaacgtttttgaatagaattttaaaatatttgtgtaattatttttgtgggatagattttttaaattaaaattattaggtgagaaaaagatataaattttaaagtttggtggaaatgataaatttttttttttagaaggtattgatttatattttttttgatgttgtatgagggtttatttttttatatatttatgttaataatgtaaattattattttttttaattttattaatttgatggtgaaaaatggtattttatagttaagatatatatatatatttttggttatattagattttttttgtaggtttgatattttttttgcgaaatattttttttgtaagttgattatttatattatttgtttattttaaaaattattttgtattgattggtaagaattattggtaagaatattttgaatattaataattttatatatattgtaaatattttgttacgtttttttattttgttttttatttttttatttgtatgtaaattttatttttttatattattagttgtgtttatttttttttttttattttggattatatgttatatgtagttaggttttttatatttaaattataggaatatttttttatattgtttttttagtattattgttattattttatttatttagttatttattttgagatagagttttattttgttttttaggttggagtgtagtggtataattttggtttattgtaattttcgttttttagatttaagtaatttgtttgttttagttttttgagtagttgggattataggcgtatattattatatttggttaatttttgtatttttagtagagatgggttttattatgttggttaggttggttttgaatttttgattttaggtgaggaggttcgtttcgattttttagagtgttgggattatagttgtgatttattattttcggtttttttttagtattattatagtatttttgtatttaaaattttaatttaattgtagtttattattgtggatgacgtttatataattatgaggtaaatatttggtttttttttatttagtaatagtaaataattgttttgatttaattttatttttttggtaattttttgatagataatatttatatttgtatttaaagttgaaaaagaaaacgagtattatttttgtaatttttatttattgtgatttaaagaattataattttgaaaatgtgttttggaagtttgttatggttatttttttttttaggtatttttttagggtatattcgtttttgtattattgtttgtttttttgtgttataaatttttgttttttttttttttttttgtttttttttatttatttttttttttaatttttttttttttttaattatttataatgttaattattttaaatgtttttgatttttttgttttggtagtttaattatattttatagtttttatgtttttttgttttggaataagtttttatttatttaattgtgaattttattagagttgtaaaatgtatgtcgaatataggatttggggattgtaagtatttatagttgatatttaatttttttttttttattataaaaacgattttagaatatgaaaaatatttttggagaaataaaaaaattaatttttttattattttatgggtttatattttttaatataattatatgggataaatgtttgtattttgttattggtttgtgaatatttatttatatttttatgtggttttgttagggatagtatatttaagtggataaaaggttgtgtggttgaatttggttttttgtttataaaagagtgatttttagtgatttatttagtttttttgtttttttttttttttattgagatgagaaaatttattttttttaatttttttgtgtgagaattaaaatgtagtaagaaaatatatatttataaatatatttgttttggtaaaggagtatattagaagggttggtttgtgcgcgtttttgttttttgtgtatgtgtattatgttttatgttattgtaaaagatgtaaagagaggtacgtggttaagttttcggggtgtggattttattagttttattttagttttttttgtatgaagagtttagaattaaaagaggaaattaatttttaagatgagttttttatgtaaatttgtagttagtttttttttgatttttaatgttttttttaaaggtaagtataagagttaaagaagttttaatttagttttttttgaaagtgatttttagtaatttttttgttttttatagg

SEQ ID NO: 18 - DNA, 5145 bp, Artificial Sequence
  chemically treated genomic DNA (Homo sapiens)
tttataaaaagtaaaagagttattgagagttatttttagggaaagttgggttgggatttttttgatttttatgtttatttttggaagaaatattgaaaattagaaggaagttggttataaatttatatggaaagtttattttaggggttggtttttttttttgattttgagttttttatgtaaaaggaattgaagtgagattggtggagtttatatttcgagagtttaattacgtgtttttttttatattttttatagtaatataaaatataatatatatatatagagagtaagagcgcgtataagttagtttttttgatgtgtttttttgttaaagtagatgtgtttatgagtgtgtgtttttttgttgtattttaatttttatataaaaaaattgggaaggataggtttttttattttagtgaaagagaaaaggaatagagaggttaagtagattattaaggattatttttttgtaaataagaagttaaatttaattatatagttttttatttatttaggtatattgtttttaataagattatatagaaatataggtaaatgtttataagttaatagtagaatgtaaatatttattttatatgattatattgaaaaatgtagatttataaaatgatgaggaaattgatttttttgtttttttaaagatattttttatgttttaaaatcgtttttgtggtgaaaagaaagaaattgaatattagttgtaaatgtttgtaatttttaaattttatgttcggtatatattttataattttagtgaaatttatagttagataaataaaaatttattttaaaataaagaagtatagagattatgaaatataattaaattattaaaataaaggagttaaaagtatttaaagtgattaatattataggtggttaagaaaaaggagagattaggagaaaaaataaatgagagggaatagggagagaaaaaaagaatagaaatttgtgatataaggaaatagatagtgatgtagagacgggtgtgttttgaaaagatgtttaaaaagagaaataattatgatagatttttaaagtatatttttagggttataattttttaggttatagtgagtaaaaattgtaaaagtggtgttcgtttttttttttaattttaagtataaatatggatattatttgttagaaagttgttaaggaaatgaaattaagttaaagtagttgtttgttgttattgggtaaaagaaagttaaatatttattttatggttgtatgagcgttatttataataatgaattatagttggattaaagttttaaatgtaaaaatattataataatgttaaaaggaggtcgggggtggtggattatagttataattttagtattttgggaggtcgaggcggatttttttatttgaggttaggagtttaagattagtttggttaatatggtgaaatttatttttattaaaaatataaaaattagttaggtgtggtgatgtgcgtttgtaattttagttatttaggaggttgaggtaggtaaattgtttgaatttgggaagcggaggttgtagtgagttaggattgtgttattgtattttagtttggggagtagagtgagattttgttttaaaataaataattaaataaataaaataataataataatgttaaaaggataatatagaaagatatttttatagtttgagtatggaaggtttggttatatataatatataatttaaagtaagaaagaaaagatgaatataattgatgatataaagaagtaagatttatatgtagatgaagaaataaggaataaaatgaaaaggcgtgataaaatatttgtaatatatataaaattattaatatttaaaatatttttattaataatttttattaattaatataaagtagtttttaaaatgggtaaatgatataaatgattagtttgtagaagaaatatttcgtagaagaaatattaaatttataagaggagtttaatgtgattaaaaatatatgtatatattttagttataaaatattattttttattattagattggtaaaattagaaaagatgataatttatattattaatatgagtgtgtggagaaatgaatttttatataatattagagggaatgtaaattaatattttttggggaaaggaatttattatttttattaaattttaaaatttatgttttttttttatttagtgattttaatttgagaaatttattttatagaaatgattgtatagatgttttaaaattttgtttaaggacgtttgttgtagtatttttgtaataaaaaattgtaaataattaaaattatggtatatttatattatgaaatattgtataattattaaaatagtataatataggtttaaaagtaagatatggaaagatgtttttggtaaattatatgaaaagagtatattgtaaaataatatttataggattagttttttttatatatgatattatgtttatattatgttatgggtatattagtatattatagtatattatgttgttattaaggtatgtgttggaaaaaagtttgaaagggttgatgttgaatttttttatagtgtttgttttttaggtattagattgtgagagaattgaaatgaaatttttattttttatttttgtaaattaaaaagaatttgagatagattttaattaatttagaagtttattttattaatattagggataaaaaggaatatagaattataggaaaaatttgtggtttgtgttttttttttaagattattttaaaatttttagttaaggggaaaagttggttagaggggaaggagggagggtatagttatattattgaatttatatgttgtaagagaaaaaaagtaggtaggggaatggttaatttgtattttttttatgtttagtaaattggtatttttttaagataaggtgaatatagagtagttattcgtggagatagtagttttttatttgtaattttttgtttaggaatttaaggaaaggtagttttttgtgtgatttaatttttagtttaatttttttttttggtataatgaattggggttttaggattttatgttttttttatattttatttatttttgtgaagtttaaaattttggaaataagtattttttttgttaataaaaaatgtttttttaagaaaggatgtttagggtatacgtatttttttaaaagtatcgttaatttagaggagtagtatggagttttttgtttgtgagtggttgatttattagttgttatttaattttagtgtgttaaggtttggtggagagaaggtggcgttagttattttttgatttattttagttttggagggcgtttgtttttttttttttatattttttttatggagtatgtgaagagtagttttttgtttttttatttgaaatattaattttgtttttttaaaattaatttaattttgagtgatgagtatggttttaagggtagaaataatgaaaaagaaagaggttagtagatttgattttgtaaaatgtgaaaattttttatgtaaaaagttataaaaaaattaaagataacgtattaaaaggagtaaattatttgtaagatatatgataaaggtataataatttttttttaattttagagatagggttttgttttgttgtttaagatggagtgtagtggtatgattatagtattatagtatattgtagttttgattttttgagtttaagtgatttttttgttttagttttttgagtagttgggattatagatatgtggtattatgtttggttaatttttttattttttgtagagacggggggttttattatgttgtttaggtttattttgaatttttgggtttaagtgatttttttattttggttttttaaagtgttgggatgataggtgtgggttatcgtgtttggttaatattaaatttttagtattaaattttttttgtaaatatagaaaagatagatattttaaaattaaaatgggttaaagttataaaaggagtaatttataaaagaaaaattttatttttatttattaataaagaaatgttagttttaatatagatgtattttttatttttatttgaaaaatgaaaatatagtgttgatgatggtgtaaatgggtatttttgtatatggttaggagaattgtaagtaggtatagtttttggtgggtaatttgttagtgtgaattagagtattaaatatttgtggatttttaataaatttataaggatgattttattataaggaaataatgaaggttatgtattagatttggttataaatttatatgttgtagtattttaaagataaaattggaaataatttaaatgtttaagagaaggaaattggttaagtaaattatgatatagataagttgtggaatatgataaaaataggttttaattgtaggagaggtgaaaagtaattttttttttttttttgttttaggttttttggttggagttttgtaaattagattgggaaaagataggttaagaagggaaaggtatattgaagttgattaagatgtgtattttttataaatatgggagtatttagtggtgagtaatttaaagggatgttagaatttggatttatagagtatattagattaaataaagaaaaagcgatttggggtttttaggttggggaggtaagttatttaatgattaggaaaagtgtgttaaataataagatgtgtttagtaaggtttgttatgtagattgaagttaatgttttttttattgataagagttgttaagagtttttttttttttgatataggagagggagatattttttataaacggttattttttttagaaattgtaaattttttttataaaagaaaaatattgtgttatgtttttaaagtttttattgtttttgttggtttatgatggttttttgtttaaaaaaaaattatatgttaaaaaggtatgttttagggtggtattgaagtaggaggtggaatttgattttggaggtggggtttggatattggattaaattgaggattagttaaaatagagataggtggaagtagttttttataaaatatgtttattagtgtgttatgttagtttattgttgttatggtaataattaatttttatta

SEQ ID NO: 19 - DNA, 5007 bp, Artificial Sequence
  chemically treated genomic DNA (Homo sapiens)
aggggtgtttaaagatttatgttttatttatgtaaaggttttttaaaataattaatttttttttaaaattttaatttttttttttttgagatgatggagttttattttcgttatttaggttggagtgtagtggtataatttcggtttattgtaatttttgttttttaggtttaagcgatttttttgttttagttttttgagtagttgggattataggtgttcgttgttacgtcgggttgatttttatatttttagtagagacggggtttcgttatgttggttaggttggtttcgaatttttgattttaggtgatttgtttatttcggatttttaaagtgttgttgggattataggtatgagttattgcgtttggttgtatgttaattttaaaaattttttatagaggtggggtgttattgtattttttaggttggttttaaatttttgggtttaagtgatttttttgttttagttttttaaagtgttgggattataggtgtgagttattgtgtttggttttaagttatttttttgttttagttttttaagtagttgggattataggtgtatgttattatgtttagttattatttttattttttgtagagatggcgttttgttgtgttgtttaggttggttttaaatttttggttttaaataatttttttgttttggtttttagagtagttgggattataggtgtatattattatagttagttttagtatatatttaaagggagttttgttttgttatttaggtttgagtgtagtggtacgattttggtttattgtaatttttattttttaggtttaagtaatttttttgttttagttttcggagtggttggggttataggtgtattttattatatttagttagttaattttttgtatttttagtagagataaggttttattacgttgattttaagcgattcgtttatttcggttttttaaagtgttgggattataggtatgagttatcgcgtttggtttttagtatatttttgagagaataaattagtttttattttttttattgattgaattttttttatttttaaagacgttttttttcgattttttgttttttaggataaggttaggtatggttatttattttgagatgtattttttttttttgtgttatgtttttggagtcgagtttggtgttaataatagtagttgaagtattttttgagtaaggttggatgggacgtggcgcgggggggtgaggaaggggcgtttttagttttggtttaggtgtttcggtcgtttgtttagttaggcgggttttttattttttttgagattttttatttttttttataggatggggataattttagaatttattttatagggttatggtggggattagtagtgcgatggtttgtttatgtgttaatttggttgtgttatagattttagttgtttaattaaatattgagatatgtcgttgtggaaggattttgtagttgtgattgacgtttttaattagttgattgtgttgtatatatttaaggtatataatatgatgttttgatatatatatatatatatatataattagatgattattattgttaagtaaattaatatattcgttacgttttatagttatttttttgttgttgtttttgttttaattagttgattttaagtgaaggagattatttttaataatgtaggtgggtttgatttaattagttgaaaggttttaaaagtagaatgggggtttttcgggaaaagaaagaatttcgttttagttgttgttggagtttttagtttgttttttttgtttgtttgttttatagattttatatttgttgttttattcggtgtggattgttataataaaatattatagattgggtggtttataaatataagaaatttaatttttatagttttgggagttgggaagtttaagatttaggtattagtatgtttagtgtttggtgagggtcggtattttggtttatagatagtgttttatgttatgtttttatatggtagaagaggaaacgtttggttttttaggttttttttttttttttggtagggtttggttttgttatttaggttggagtgtagtggtataatttttattttttaggtttaagtgatttttttgttttatttttcgagtagttgggattaaacgtatgtgttattatgtttggttaatttttgtagttttagtagagatggggttttattaggttgtttatattggttttaaatttttgagttaaagttatttttttgttttagttttttaaagtgtcgggattataggtatgaattattatgtttagttattttagggtatgaattttatttatgaaagttttatttatataatttaattatattttaaaaaggttttaagagtagtcggattttttatgtggtttcgttttgggttatagatgattggttttttattatatttttatatgggagagagagagttttggttttttttttatttttataagtgttataattttagtatgggtattttatttttatgagtttatttaaattttattattttttaaaggttttatttttaaatattattatattatattaagaattaggatattaatatatgaattttagggtgatattaatatttagtttataggaaaggttgtggttgtaattggtaaataattattagttttttttgttattttagatgggaaatatgtagttattttttaatttggataatatttttgtttgtgtttgtgttaaggtatgattgtgttgtggttttatttttgttttgatttattatgtttaaagaatgtttttgtttggtgttgatgttttgtgtagtgattgataataggataggagaattgtttgaatacggagatagaagttgtagtgagttgagatggtgttatggtattttagtttgggtgatagagcgagattttatatatataaattacgttattgtattttagtttggtaatagagtaaaattttattttaatagttataataataataaaagtttataaaaagatttatatttgagtattattagtgaaaaatggggaaattttaaatgtttattaatagatgaataaatataggattatagtatatttatataatgggatattattgagtaatattatattgtgaaaattataggtataaataatttggtttagttttaaaaaatatgttgagtgatagaatatagatatagatgagtatatttttttttaggaaattttgaaataggtaaaagcgatatattatgagagagaggatttcgtggtgtttggtataagaagtgggaatgatgaattgtaaagaggttaggtaaagtttttggtgtagtggaaatgttgtatattttgattgtgttagttataatagggttgtatgtatttgttaaaatttatgaaaatgaatattttaagtgggtgtatattattttatgtaaattatatttagttaagtttattaaagaaatatagtaagatagatttttttatgtatttttttattttatgaatgtggtatgatattttattgttaaaagtaaatatattgaatattatattatgtgtttatattattttttaaaataatttatagtaagatattgttttatttattgaggatttatttttttatatttaaaaagaggatggaaatatttttttatggtaggtaggatgaatgaatatttttatagatattattgtgtatagagattttatttgtatatggttgtaaatattgatatgttttaggtattgaggattttttaggtgtgtattatagagagtaaaataaaaaattatatgagttgaagttaaattttaattttgtttgtatatttaatttatattgtttggaaatattatgtttttgggttttatttaattattagaaatgtatttttatatgaaagaaaatgttaatttttatggtaagttttataaaaaaattgttgttgtttttattgtagggaatggtaatattaatggaaaagaaattttttttggatttgtttatagaagttttcgttttatatgaaaatattatatgttttttattttagagatgtcgttgaaatattgtaaattagtgtattaattgttaggggaaaaaatttatagttatattttttaaaaatattttatatgatattatgatatatggtaaagttattagtatttatagttgtgaagttaaatagtatttgtgtgtggtgaatatgaggttatggatggggagtatttaaaggggagggattaggttagtggtattttttttgtttttagttttatggtatatagatgttcggtatagtttaggtgaatgaatgaatgaatgaattgaatgaatgaatgattgttatttttattatatttaggatttttttttattttttttgttttagatatttatatgaattttatagaaatttatattttgtaggacgaattattttataggttaagaagaggtcgtgattcgggttaggtttggagtgattagttgtttggtgtaaatagttgtgtatagaaaagtattttagagtggaaggattttagatatggggttcgtatgttttagatggtttcgaaggtattgatttaggttttggtgtttttggaaggtaagatttagattttgttttatttttttttatttttgggcgagtttttggtatttttggtttatgagggttaatttgtgtggaggggataagttttgagtacgtgtgggtttgaggttttttttttatgtagggttgaggttttttgtttttttttagttttttgtttcggtttgtagttttttttttttatttttttttttttttttgtttatataggaagttttggaagttgttttttagatatgtcgttgttgttattgttgtttttgttgtgggtaggtgagtggttgtggggagaggggtgtcgggttggtcgagttgattttcgtttttatagg

SEQ ID NO: 20 - DNA, 5007 bp, Artificial Sequence
  chemically treated genomic DNA (Homo sapiens)
tttgtgggaacgagggttagttcggttagttcgatatttttttttttatagttatttatttgtttatagtaggggtagtagtagtagtagcggtatgtttgaggaatagtttttagggttttttgtgtgagtagaaaagaggaagggagtggaggggaaggattataggtcgggataggaagttggggaggagtaggagattttagttttgtatggaagaggaattttagatttatacgtgtttagagtttgttttttttatatagattgatttttatgggttagagatgttagagattcgtttagagatgggaggagatggagtagaatttgagttttgttttttaggagtattagagtttggattagtattttcggggttatttgagatatgcgaattttatgtttaaagtttttttattttgaggtgtttttttgtgtataattgtttatattaggtagttggttattttaggtttggttcgagttacggtttttttttgatttgtggggtggttcgttttgtaggatataggtttttgtagggtttatgtaagtgtttggggtagaagaaatgaagaagggttttagatgtggtgaaggtgatagttatttatttatttaatttatttatttatttatttatttaagttatatcgagtatttatgtgttatgaggttggagatagaagagatgttattgatttggttttttttttttagatattttttatttatagttttatgtttattatatataaatattgtttggttttatagttgtggatgttggtgattttgttatatgttatggtattatatgaggtatttttaagaagtatgattatggatttttttttttggtagttagtatattgatttgtaatgttttagcgatatttttaaaataagaaatatgtagtatttttatgtaaaacgaaagtttttgtgaataagtttagaagaaattttttttttattagtgttgttattttttgtagtggggatagtagtaatttttttatggggtttattatagagattagtatttttttttatgtaaaaatatatttttgataattaaatgaggtttaaagatataatgtttttagataatatgagttgaatgtatagataaaattaaaatttagttttagtttatatggttttttattttattttttgtggtatatatttgggagatttttaatgtttgagatatattagtatttgtaattatatataggtaaaatttttatatatagtagtatttataaaaatgtttatttattttatttattatagagaggtatttttattttttttttaaatataaggaagtgagtttttaatagataaaataatattttgttgtaagttattttaaaagatagtataggtatataatataatatttagtatatttatttttaatagtaaaatattatattatatttatggagtagaaggatatataagaaaatttgttttattgtgtttttttaatgaatttaattaggtataatttatatgaggtgatgtgtatttatttgaagtgtttatttttatgaattttgataggtgtatatagttttgttgtgattggtataattaagatatataatatttttattatattaagggttttgtttaatttttttgtagtttattatttttattttttgtgttaggtattacgagatttttttttttatagtgtgtcgtttttgtttattttaaaattttttaggaaggaatgtatttatttgtgtttgtattttgttatttagtatattttttgaaattgaattaagttgtttgtgtttatagtttttatagtgtgatattgtttagtagtattttattgtatgaatatattatagttttatatttatttatttattgataggtatttgagatttttttattttttattaatggtatttaggtgtaagtttttttatagatttttgttgttgttgtggttgttgagatggagttttgttttgttgttaggttggagtgtagtggcgtgatttatatatatgaagtttcgttttgttatttaggttggagtgttatggtattattttagtttattgtagtttttgttttcgtgtttaagtaatttttttgttttgttgttaattattgtataggatattaatattagataaggatattttttgagtataatggattaagataagaataagattatagtatagttatgttttaatatagatataaataagaatgttgtttaaattggaaaatggttatatattttttatttagggtaataggaaagattgatgattatttattaattatagttatagttttttttatagattaaatgttggtgttattttaaaatttatgtattgatgttttaatttttaatgtgatgtgatgatatttggaggtggggtttttaggagataatgggatttaggtgagtttatggaagtggaatgtttatgttgggattatggtatttgtaagaatgaggaagggattagagtttttttttttttatgtgaggatatagtgagaagttagttatttgtgatttaggacgggattatataggaggttcggttatttttaaggtttttttgggatgtgattaggttatgtaggtggaatttttatgaatgggatttatgttttaagatggttgggtatggtggtttatgtttgtaatttcggtattttgggaggttgaggtaggaggataattttagtttaggagtttgagattagtatgggtaatttggtgaaattttatttttattaaaattataaaaattagttaggtatggtggtatatgcgtttggttttagttattcggaggatgaggtaggaggattatttgagtttgggaggtggaggttgtgttattgtattttaatttaggtgatagagttaaattttgttaaaaaaaaaaaaaagatttaagaggttagacgtttttttttttattatgtgaagatatagtataaggtattgtttgtgaattaggatgtcggtttttattagatattgaatatgttggtgtttggattttggattttttagtttttagaattgtgagaattgaattttttgtgtttataagttatttagtttgtggtattttgttgtagtagtttatatcgagtaagatagtaggtgtgaagtttgtagggtaggtaggtaggaggggtaggttggaaattttagtagtagttgaagcgaaatttttttttttttcgggaaatttttattttgtttttgaggttttttaattgattgaattagatttatttatattattgaggataattttttttatttaaagttaattgattagagtaaaaataataataaaaaggtaattatgagacgtgacggatatgttaatttgtttgatagtagtaattatttgattatgtatatatatatatatatattaaaatattatgttgtatattttaaatgtatatagtatagttaattgattagagacgttagttatagttataaaatttttttatagcgatatgttttagtgtttggttgagtagttggggtttgtaatatagttaggttggtatataaatagattatcgtattgttggtttttattatggttttgtgaggtgggttttgagattatttttattttgtagaaaaggatgaggagttttagagaggataaggagttcgtttgattgaataaacggtcgagatatttgagttagggttgggaacgttttttttttattttttcgcgttacgttttatttaattttgtttagggaatgttttagttgttattattagtattaagttcggttttagggatatggtataaaaaagaaaagtatattttaaagtgggtaattatatttgattttgttttaggaaatagagagtcggggagggacgtttttgaagatgagaagagtttagttaatgaaagggataggaattaatttatttttttaaaaatatattgagggttaggcgcggtggtttatgtttgtaattttagtattttgggaggtcggggtaggcggatcgtttgaagttaacgtggtgaaattttgtttttattaaaaatataaaaagttagttagttgggtatggtggagtgtatttgtagttttagttatttcggaggttgaggtaggagaattgtttgagtttgggaggtggaggttgtagtgagttaagatcgtgttattatatttaagtttgggtgatagagtaagattttttttaaatatatattgaggttggttatgatggtatgtatttgtagttttagttattttggaagttaaggtaggaggattatttgaggttaggaatttgagattaatttggataatatagtaagacgttatttttataaaaaataaaaataatagttgggtatggtggtatatatttatagttttagttatttgggaggttgagataagaggatagtttgaggttaagtatagtggtttatatttgtaattttagtattttgggaagttgaggtaggaggattatttgagtttaggagtttgaaattagtttggggaatatagtgatattttatttttataaaaagtttttaaaattagtatgtagttaggcgtagtggtttatgtttgtaattttagtagtattttgggagttcgaggtgggtagattatttgaagttaggagttcgagattagtttggttaatatggcgaaatttcgtttttattaaaaatataaaaattagttcggcgtggtagcgggtatttgtaattttagttatttaggaagttgaggtaggaggatcgtttgaatttgggaggtagaggttgtagtgagtcgagattgtgttattgtattttaatttgggtgacgagagtgaaattttattattttaaaaaaaaaaaaattaaaattttaaaaaagaattaattattttggaaagtttttgtatgaataaggtatgaatttttgaatattttt

SEQ ID NO: 21 - DNA, 16173 bp, Artificial Sequence
  chemically treated genomic DNA (Homo sapiens)
ttttaagataaaataataatttaaaaatgataattaaataaataaaaagtatatttaaaaaattaagtaaatgtggaaatattagaagtttatattttaaaatttggaatgaggtgaggatgtgtatgattattatttttttttatttttagatgtttttgttagtatattaatttaagtaaaataaattagttgtagaaggattgggaaggaaatataaaattattattatttgtttgtgatatgattatttatatataaaatttaaaataatttagaaatattttaatttaataagataagttaataaggtagtttaataaaagattaatataaaataataaattgtaattttatatattagtaataaaaataattaaaaagaagataatatttgttatagttttagaggatataaattatttaggaataaatttaataatgaattaaatgaatttattatttaataataatgaatgaattaaaattattatagggaaaattataaattttaatgaagatttaaataatggagatatatattaagttttttgaaggaaagatttcgttttttttaggttgatttatggaggaattttgattaaaatttaaaaggttgttttggaaggaaatttgataagtatttataaaattgtatattattattattatttggaagaataaagagttaagaatagttagggtatttttgaagataatttgggagaggaaaatttgttttatagatgtttgaatttatttaatgttatagtaaataaggtaatggcgaaggtatttggggtgtttatattgattaatgttagagagtttagagttagatttatatacgtatgaaatgtggaatatgatagaaatggtatgttaggttagaagggaaagaagagattatttagtaaatgtaattaggaaaatggttagttgtatgaaaaatatataaaattggttttttgttagttatttattttgttttttttagttttaattttatttttttgtatttttttttataatattggttataatgtgtgtttgttttgttatatgagaatatttagttttatatagaggataagaaaagtaggtgggtgaaatttattagatgtattaattatagatataaagtaagtaagttatttgtgagatataggtagaatttagaagatgtgttaaaaatgtaggatggagtattttttattcgggatattttttggattttggaatatttgtattatatttatatgttgagtattttattttagaaatttgaaatttaaaatgttttaatgagtattttttttgagtgttatgttagtattcgaaaagttttagaatttggagtattttaaattttagatttgggatttttaatttatagtaagttagtaatttgtaagatatgtaaaatagaataaatggaatagattataaaaggatggaataaataagagtgttatttataggtagaaaaggataggaaaaaataaattataagttatgaggtatagattatgttattttttggttggtgtttatgttatttttaaattgattatttattggtggtattttttggttttttataagttttatttaagaaatattggtaaaaagtatggttttttagaatattgataaagatttgtggttaagtttatttatttttaaatattttttaatagaatgagtatattttggttttaagtattttttttatattgatttttttatttaattttagttttggtttttataattatattattgtagagcgaaatatatgattgaggttgtgagattgtgtaggatttttgttttgtttgtatttttaagtgtattaattttgtgtaaatttgtttttttggttttggttttatgttttaaatagattttataatttttgtgatttgattattataatttggtttgagtttttttgatttgtggtttttggaatagtttgtttattatggaggtaaatattgtattatggtgatttattataggatattggtttttagatttttttgttagttgattttttgttaggttttgttaagaggaggtattggagggagattagaaggtggaaagaggaaaaaagggatttgtaggttgttattgtattagtttagtatttgaatatttttatcgttaaggatttttgttaaattgaaaaaaaaaaaaaaaaaagtttgtaatgtgggaaaaaagttttggttttaaaatataaaattggaaaattaaaatttataaattttttattaaatgtttataaaaatgttaatttaatttgtaaattgtaatttaatttttttatagttttatgtaaatataataaagtttgaattataagaataaaatgaatatattttaaaatttagaattataataattattttttttatttttttaatattagatatatttgatataggatgaggtttttttttaggttgattgatatgatgcgtgtgtattttggggaggggtgaggtaagggatgtttaatagtaaaagtggttgtgatttttaagggtttgtaaagggtttgagatagtttttgatttagtgtatttttgttgtattttttattttgtgcggtgtagttaatattttttagtaatagtttatgaagtaggagagtagagaattgaggagtagtttagaaaggttagaattttgaagagattatatagtttaattttatttggtttgtgaggaaatgtaaggttggggtttttgggtatttttgtgtttagtggttagaacgtgtgtttgggggtggtttgggtaagggtgtgtgtgtttggggtgatgagttttagtgattttggaaaatatgaagagtggttaattattgtttagttttgtagttttggggttatttataatttttgtaagttagagaagaaatagttttggttttttagaggaagggatttgttagttttttatattttttatttttattttttttttttgaagtttgatatttatttcgtttttgttttttgtatttagtaagtgttttttttatattagggttttttgaattttagtgtgtatgagttatggagaatatttatttaaagtatagattttggtttttatttttgattttgtgtagattatgttttgagaaaattttgttttatagaattattttttttttttttgtttttaaagttagttaagaagtttaggtattaaagaaagataagttattttttttgtttttcgtggtttagttatgggagataaatggtatttaaagtaattagaaaaaaaaaatttggaaatggaagttaaagtggattaaattagtttttatatttagtagggattataattttatatttgtttttaattgtatattggatgtttgaagtagatttagcggtttttggagttgaggaagttgaggggagtggggggtttggtagtgttggaattaattttttttttttgttaattgggagttttaaggattaatgattgattttaaaatgtatgtttgttattttttttgtttttaggtttttgttattattatgtgattagttttgaattattatttgtattttgaaatagatttatattatttcgttgtatttaattaaattagtatattaggtttttgtttttattgtgtgatgaaagattttgttttttgtttaaaggaatgttaggtaataagattagaataaggagattttgggtttgtttttagatttggattttttttttgtgtaattttaacgtatagtaggtttgagatggattataaaggtaaagttatttttataatgttagagtgtttgcggagaaattagaaaggattatagagtgttggtttggttttttttttttttttttaggttatgtggtatagatattatggaagagtttgaattgagtatttataattttatgattttgttttggatattagagtagttttttttaggttatattttatttgatttttttttggtgttattatttgtttaggttggttttttttttttttcgtttttacgtttttaagattaggttgtttattcggtttagagttttttttatttagtataattaatatttagaggaattggtgaggaataggaagtttaaggatttattaagtggtggaggatggagttatagaaagttttttttttgatgggagagtaaggtgaaatttttagtggtttagatttagggttggagaggggataattggggagaaggtatttagggaagttttttttttttaggatgatggtgatggggaattaaatggggaaatatggaaggttataggaaaagttaatataagttagtaaaaagttaatataatataaaaaggttttgtaggaaaaaaaaaagaaaagaaaagaaagaaaaagtttttaagaatggtttggatagttaaaatgaatatttatagttacgtatatttgtttatttttgacgttttatttatatatagtataggatttggtgaggttattattaaatgtgttatattgtggttaagttttatttgattaacgaaatgtttatatttttaaattgaggtttttatagtagattttttttgtaagattgttattggtttataatttaaaaataaaggaaaattataaggaaagaaaagtggggaaaaaatcggaggaaatttgtttttgttttggttatcggtaaggttgttataaaggggttaaaagttaagtggaagtggagtttgaagaagtgggatggggtttttttagaaagttgaacgaggtatttggagttcgaataaatttttattttttttggtttcgacggcggtaatttagttttttttttaacgtttttcgtttttgggattaattaggggagtttaagttagtagtagttaaggagaggcgttgttttgttaagattaaaaagggaggggagaagagaggaaaaaagtaagaattttttatttttttttcgggcggagggggcgggaagagcgcgttttggttaagtcgagtagtgttttttattcggtgcgtttttttaggagtcgcgcgggaaggatgttggttcgtaggggcgcgcgcgtagggtttaggatgtcgcggggttggatcgcgttttgtttgttgagtttgttgcgtgagtatcgttcgcgcgtcgcggtcgtttggtttcgtcgcggggagggtggaggttttttgggaggttgaatagtagagtagagttttacggagggaagggatttttgtttaatttacgtattgtcgtttatagttgttttttttcggggttagcgttttatttgggagttgacgggggtgggaggggaagggaaggttattattttcgcgagtgtgcgttagtcgaggtgtgaatcggttagtacgattggttttaatggattgagataaagcgttttggagatgttagggttttttttggttgttagaggcgcggagtgcgaagttgtagttagaatcgggagattggggaggagagaagtaggaaaagttttgtggtttttggttgatttagaaagtatagatacggagcggattgttgggaaggggtcggtgtgtttattttgtatagggattgggagagttagaagtggatattaaggaattcgagggaagcgaattagggatgaggttttaggttttaggttaggggtgttcggaatgaatagttcgtgaaaaggaaaaataaaattaaataattaattaaataaaaattttgtatttaagattgggaagttgagtttgaatttttattttagtaattttatcgcggaggaggtagaagtagatagaatttgttttgcgtttagtttcgttcgttttattaaaaatcgttatttttgtataaattttaaaatttgttattttttggagttttttttttttgtttttgttttaagttttaaagttagtggatgggttagaatattgtttttatttatttatatatatttttatttttaaggttttgtttttatttcggttaaaaaaaaaataggtattcggtaaatatttatattcgattattttttttggggaatgatattttttattttatttttttgtatttggaaggtttgaaatttttgaaattttgtatattgtttttttttttgtttatagtattttagggtttttaattttgtatttttattatattttaagggttatttattgtggttttgtagagtgatttggattagatttttttgtttttagttttttttgttgtttatttttgggttcgtttagttggggatagttgtttttgggttggaggaagttttgagagaagttttgggttgttttgtttggtagttttggatgtgtgttttggggtaaggaaaagttattaatgaggttttaaaattttagagtgggtgttagattaggtttttataataggagtgagtcggtcgggcgtagtggtttacgtttgtaattttagtattttgggaggtcgaggtaggtagattatgaggttaagagatcgagattattttggttaatatggtgaaattttatttttattaaaattataaaaattagttgggtatggtggtatatttttatagttttagttattcgggaggttgaggtaggagaattttttgaatttaggaggcggaggttgtagcgagttaagattttggtattgtattttagtttgggagatagagcgagatttttttttaaaataaataaataaataaaaaataaaaaataaaaaaataggggtgagttggttagtggtgtagattttaattagatgttttatttttttttggttatatagtttgtgatgatttggtttttagtcgaatgaggtttattttttttttatttttttagttggtaagtgttagtttcgttttggtttgtcgaggttggggttgggggagtaatataattttggtaaaattttggattgatatgttgagaatattttagtttttggtggggagggatgaggtataaggttttatttttagttttgttagattatttgagttaattgtagttttatgttttttttaagagttttttagggtttttgtttggatttgttttgttttgttaatattaggagttatttttagttttgggatatattgtgggataaatgagataattgagtgtattttgaaatgttattatagggttattgtagaaatgttattattattgtaaaatttagggtagaggggatttttgtggtttgtttttttattatttattttaataaagagtttgttttgggaagttttttttttttgtttttttgagaaggtggtatgtgtataggtattgtaattaattagaagtgggttgtttttgttggaagtgggggagattatagagtagagttagggtaaggggtttaagggttattaggtagtattgttagagtgttggttggagtaggaagttttttaggtaattagggaatttttttgttaggtttagggtatttattttttttaagttttttaaggtttgtttttatttttattttaataatatttttaggtttttttcgttatattttttttttttttttgggtttttcgtgtttgttgattttatatttatattttgtttagggttatatgtaagaggggaaaaataaaagggaaaagaattttattagttattttttagaggggagaggattttattttttgaatttttgttatatggcgatagaggaggagtaggtttggggatttttgattaatttagtggtttttagtgtttcgtatttgtagatttaatttagttggtattatttttgtagatgtatgtttttagtagtatttttgttcggttgataaaatatataggggtttggggttttttttttttatttttttggttttattttttgggtttttttatttttttgtttttatttttttttttcgtaatttttgttttaaaaagtttagggtaagaagtgttaaattgtagtagataaatttagttgtagagttttacgaaaataaatgaaaatgaggaataaattttattttttatcgttggttttattgtttgattttttttagattttgagttggagggtttgggtttatttttagggttggatggttatttaattttatttttaggtatttgggttttttttttttattgattttggttgatttaattaaatggtttgtagtgtggagaattaaaaataagaaggtatggaaaaagaatataatattattttttagaagaaaatttttatagtcgttagggttgtgagaattttatatttttgtgggtttggatttttttaatgagaatatttttttttttttttagttaataaatgaaaatatattatttatgatttttagttttagagttggacgttgtgttaaggagaaagatgcgtgtatgttggaaagatggagagataaataaatagggatgtatataaaggtgtattttttagtatttgtgtttttggagttcgtcggaatgagttatttttttttagatgtaacggaaaaggtttttgggtttaattgggaagtaggttttttttttatttggaaaaatgaaattaaattgatattttttagagaggagtggtatttttaggtagttgatttaagaaaatgttttaagaggtttttgagtgataaagtttagaattttagataattttggatgagtaaaggtaggtaggaggttgaattgttgagtatgataaaatgaagtgaagttttgtgtttaggtgggtataagagatataaggttgataggattttagagtttaggaagagtatataaagggtggagaggtgtttggagttatagtaggatagtggtgggtggaggatggaaaagatttgggaggaaatttttttttaatatatggttttattagtatagtaatgtttaatattttagggttatgttattgttttttttgggttgttttgtaatttcgttttatgtttttaattttttagtaaatattggttatatatattagttttgtgttagtggttttttggggagggtaaagtaatttattttattttggttaatttacggtgaagtggtatattagtgcggatagggagttattgagttatggagttataatttaggagtttgtggtgttggtaaaatggaggaagaggtgatagggagaaatgtaggtgtttagagaatttttaaaataattagggttttatagtaagtggatggggtttaagatatgttattttatttatttatttatttatttatttatttatttgagaagaagttttttttttgttgtttaggttggagtataatggtgtgatttcggattatcgtaatttttgttttttaggtttaagtagttttttttttttagttttttaagtagttgggattataggtatgcgttattatgtttagttaattttgtatttttagtagagacgggttttttttatattggttaggttggtttcgaatttttgattttagatgatttatttatatcggttttttaaaatgttgggattataggcgtgagttatggtgtttggttaagatatgttatttgaatataaaatagaaatttcggtatattgggaatttttaggttatagatttttggtttatatatatttatattttagtttagtttttgaagtttaagaaggtatttgtttagttttttgttttagtttaggatgattgaaatttatggtaggttttagagttggatagttttttaatacggatgttttttgagtgtttgtaggaagtatggatggattatttattttttaaagtggtttattttatttttataaatagttatattattttatattttttttttggattgtagtgaaattggtttttttataatttttaattattagttttaattttattttttgggttggtatagatttaatttggttttttatgataatatttgaagatgtttttagtgggttttattagattataaattttttgagggattgatttaaatgataatgatattaatatttaatggaggaaagagatttagtttttattttgtattttttatagtattgagcgagattttttgtatattattggtattgtagaaaaatgagaatgaatatatagaatgaatgtattttttatttaaaatgtttaggattagaagtgttttaaattttagatttttttagattttggaatatttgtgtaaatataatgagatgttttagtaataggatttaagtttaagtatgaatttgtgttttttgtatattttatatatatagtttgaagataattttagataatatttttaataaatttgtggatgaaataaagtgttgattgtgttttgattgtgatttgttatatgaggttaggtgtggaattttttatttgcggtattatgttggtatttaaaaagtttcgtattttggagtattttagaatttttgatttttagattaggggtgtttaattagtgtaaataatatgtattttaaagaaagttatttattttttttttttaaattttttttttttatattaggggttagtaaattttttttataaagggttagagagtaaatattgtaggttttaggggttatatatggtttttgatggatggtttattttgttttattttacgatatttttagaaatgtaaaagtcggttacgtacggtggtttatgtttgtaattttagtatttcgggaggtcgaggtaggtagattatttgaggttaggagtttgagattagtttggttaatatggttaaatttcgtttttattaaaaatataaaaattagtcgggtatggtggtatatgtttgtagttttagttatttgggaggttgaggtaggagaatgttttgaatttgggaggtagtggttgtagttagttaagatcgtgttattgtattttagtttgggtaatagagtgagattgttttaagaaaaaaagaaagaaaggaatgtaaaagttattttttattgattgattatataaatataatttttgagttaggttaggtttattggttatagtttgttaattttttatttagatgaaataatattagatttttaataatatgatttggtttttagaatttttttaattttggttatttttatatgaatattttttaatttaattaatttttttttaaaatataatatgagaataagattgttatgattagaggtagttggtaggaatatatttgttatagttgttttttaattttattgttttttttaaattttaaggattgtgttaagtattaggagtaaaatatataagaataagaatggttttagtattttagaagtttatatttttattgaggtgatagttagatttattttgaggaagtagtatatatgattttgtggtagatgagttatagaaataagtattttatgtttattgagaagtagaaggaaggggtttaaaataaaagatatttattattttttgaatttttattagataggataattgtttttattttttagtttttttgttttttaaaatagttaagatatagggattatttttatttttgttttataggtgaggtttatagagttgaagtaattttttaaattatagttaaaatatggtaaagaagtttttgaatgtggtttgtttggttgtagagtttgagttttttgtttttgggttatatcgtttttttggtgatatagtttgtggtttttaacggtttattttttggtagaggttggtatgtttttttattttagttttgtaattttatggattaagatttttaggaatttttttaagatattttttttgatttaggtgttagaatatgaaagtatgggtaaaataagattggtaggttaggagattaggaaatagtattaggaaaaaattaaggagggttgtgaaaagtaagattaagtataggaaaatttagttttttaaaatatggggatttagttattttggtagtagagttttttggatcgttgaggatttgtaaatttattttaaagaataaaagagtttttaatttattagtggtaggtagaaatatttttaaaatgtattgtatatgtttttgtttttttagaatattttttcgaaaaggattttatgatttagatgtattatgaatatgtcgtggttatgttgtaatttagtgatattattaatgtttattaaggtatagatatttaatttatttatttttattataaatgatttaagaaaattggtgtgagtttttatatttatgtttgttttttatttatttttgttttttagtttttagttgttgtttttttttattatttgtttttaataggttttttttacgttttaattttagttaggatattagataattagggttattagaattatgtgtaaaataagaataattgattttgaagaagtatttgaaagtttagtgtatgatttttattatatgaattttgtgatattttttagaatttttattttattaattttttgagattttgtttttttttttgtttttagtttataagttgagattaattagagtaattaagggttaaatggagtttttagggaaatatagttaataaggatggattgagaagtaaataatagaagagagttttttatttaattttaaattgtattataatttttgtagttttgtgggtagggatcgttttttttatttagaatgaaaaagagtggaggttttattaattgttttttaggatgtgataagtttttattgattggtaggtttttgttatttttttatagagttgggagttagaaggttagataaagaaaggttagtgtttgatggtttaatgttatggatgtgtgtgggaagataggataaaaagagatttgtggttagttttgatttttataaatgttatttttttagggttttagagattgtgaatttaaaagatgtattttttttgttgtgtcgtagtgtttatgttaggattggttttaggtttttggttaaggtgtttttttgttttgtattagtttaggtatttttagttatttagtttggtttttttgtttttttatttgttttgtttttttggtgttttagagggtgttttgtttattttggggttagagttttgattttgaagttggggttttttttttatttgtaggtggattttgttatttattttatagcgttcggtttggtggtgggtggaggggttgttgtagttgcgagtttggttttagtgggttagtagttggtttgggtttagagttgttttgtttttttggaataggtatttttgtttttagaattagtagtaggttttattttatatttggaaaagtttaaaagtgtttgtttaggtgaaggaggtttttcgggggaggggatttaaaagtatgatattattttagttaggtttagttttttttggagagagaaaagggttgggttagggtggattagatggggtttttagtaattagtatgttgggggcgaagaggaagagagtaggtaagaagaggagttttggaatggtgttttgagaaggtgattttttaatttagtgtttgaatattgtttttttggatgaatttagatgaatttgattttaaagttagagtggtgagagggttttatttaaataggaaagaagtttggattggtttttgtattaatttattttgattaatttattttttgtttaagttagatgggagtttatttttttttttatagagatgtggggaataaatttcgattttttggtagtttagatttagtttaatttttttgttgtatttatttaagagttagttaaacgttagtgttttattgttgtttttttttatgaattatggttttttttttgggtagtattttggtgatttaggttttttatttttaagatagagatagtgatattttttttttttattgtttatttgatatataatagtaagatacgattgttgtagttattattaatagtaatttgtttgtagtaggttgtggaaggaagtagatatgagagagtgaaatttttgttattatttttagggaaatcgtttttggttttaggttgatggtcgtgaagttaaaagtttaattttttttttgattttgagggaaataagagatgttattttattttgttgtttatttggaaatcgttgaaaagtatagatttagattttaattaggaaaatttagagataagttttagggtggtttgggatttttagaggtttttttttgaagatgtaattgtttttatgaattttggatattaagtttatttttaatatttataaggtttaaggtaagagtataatagaggtttatatattatatttttaaatattttaaggttgtaagttaggttaattaattaataaaatattttttatttttttattttgataaatatattttcgtgattatttggaaggttaagttttaatttgggatgtttagatttttggaatttattgttatagtgtagtttagtaggaagagatggtttttggttttagtttatttttttttatttattttttatttatgattttggtttatattgtaaggtaattgtatgtgtgtttgggatattttatttataggtttaagtattaagtattaatttttttttttgtaagtagttattatttggttattattgggttttgggggtgtatatttttgtgttgtagttttttttagtaggatggattgggagaagcggtttatcgtggatgtgagtaaagtgttatttgattaagaagtgttaggatttttggtttttatagtatgatttagaagagagggtatattttgattggtttttataggaagtaggatagggtgtgggttttttgaggtatagggtttagttaagaagttttttttttttgtgtttaatgaggatattgattgggaatggtgagtaatatttgtaattttagagttttgggaggttaagataggaggattatttgaggttaggagtttaaggttatagtgagttatgattttattattgtattttagtttgggtgttgtgatgatagagtaagattttgttttaaaaaaaaaaaaaaaaaaagtatgtattttaggatatatagaagagatgtgtaaagatatttatgaagatttttagagaaaaatgagatttaaaatattatattataatattataataatttagtatttgttattttattgtttattttagtaatttatgtaaggtagttagaaaagatttttatttaagaggtaagagagttgagatatatatatgtattaaattatatggttagttattggaagagttagaataaagtttgtttatttttttattatattgatgagaaattagattttgtgttttttggtttattagttgaatttttaggttagagtatgttaaaagaagaaaaggaaaggcgaatgggtttgaaggttatgagtaaaaggatgaggggagtatgggaatgggaagtttgagaagtatagatttttaaggggatcgtatagagatagtgagtttagtgattattttaagagttagtatattggatggagagtgattaaaaaagaggatatagtgaaaagaaaaaagaagtatgattttttgtatatattagatttttgtaatatttatgtaggtgtaattttatattttagtatgtaattaaatatattatgaatattattttatagttttacgttgttatagtttttataatttttttttttttaatgtttgtttatatgattatataatgattatggtatattaagtgtatatattatttattttattataatttatttagttgtttacgttttttttttataaataatattgtatgagatatttgtatgtatataaatttttttttttttatgtttttagggtaaatttggtagtgggaaattaatttattgtttaggagtatgtttttgttgttgttaataaggggtagtagggaatgttttagacgaattttatttgaagttaggaaattgtattaggtgatattattaggttgatatttttaggttttgatttttttttttcgtttttttatagt

SEQ ID NO: 22 - DNA, 16173 bp, Artificial Sequence
  chemically treated genomic DNA (Homo sapiens)
gttatagggaaacgaggaggaagaattagaatttaaagatattagtttggtgatattatttgatgtaattttttgattttaggtagaattcgtttagaatattttttgttgttttttgttggtagtaataagaatatatttttggatagtggattaattttttattattaaatttgttttgaggatatagggaaggaaagatttatatgtatataaatgttttatatagtattatttataggagggaaacgtgaataattaaatgaattatgataggataagtgatatatgtatttaatatattataattattatataattatataaataaatattagaaagaaaaaaattataaaaattgtagtaacgtggaattatgaggtgatgtttatagtatgtttagttatatattaaaatataaaattatatttgtataaatattgtaaagatttaatgtgtgtaaaaggttatgttttttttttttttttattgtatttttttttttggttattttttatttagtatattaatttttggaataattattagatttattgtttttatgcgatttttttaaaaatttatattttttagattttttatttttatattttttttatttttttgtttatggtttttaaatttattcgtttttttttttttttttttagtatgttttgatttaggaatttagttaatgaattagggaatataaggtttggttttttattaatgtagtgggaaggtagataagttttgttttggtttttttaataattaattatgtaatttaatgtatgtatgtattttagtttttttattttttaagtaagggttttttttggttattttatatggattgttgggataaataatgagataataaatgttaagttattatagtattatagtataatgttttggattttatttttttttgaagatttttatgagtgtttttgtatattttttttgtatattttgggatatatattttttttttttttttttttaagatagggttttgttttgttattatagtatttaggttagaatgtagtggtgagattatagtttattgtaattttaagtttttggttttaagtgatttttttgttttggttttttaaagttttgggattatagatgttatttattatttttagttagtatttttattagatataggaaggagaagttttttgattgaattttatgttttaaagagtttatattttgttttgttttttgtgaggattaattaggatgtatttttttttttaggttatattgtggggattagaagttttagtattttttgattaaatggtattttgtttatatttacgatgggtcgttttttttagtttattttgttaaggggaattgtagtataagggtgtatatttttaaggtttagtggtggttaaatgatgattgtttgtagggagaagagttagtgtttagtgtttaagtttgtgggtggggtgttttaggtatatatgtaattgttttgtaatgtgagttagagttatgggtagaaagtagatgaagggaagtgggttggggttaggagttatttttttttgttaagttgtattgtggtagtgaattttaagaatttgagtattttaaattgaaatttggttttttaggtgattacgaagatatgtttgttaaggtaagaggatagaagatattttattagttagttggtttgatttataattttgaaatgtttagaaatatagtatgtaggtttttgttgtatttttgttttgggttttgtaaatgttaagggtgaatttggtatttagagtttataaaggtagttgtatttttaaggaagagtttttgagggttttaggttattttaaagtttgtttttaaatttttttgattgggatttagatttgtattttttagcgatttttaggtaaatagtaaggtagaatgatattttttgttttttttaggattaagagggaagttagatttttggttttacggttattaatttggggttaagaacggtttttttaaaggtgatgataagggttttatttttttatatttgtttttttttataatttgttgtaagtagattgttattaatggtgattgtagtaatcgtgttttattgttatgtgttaggtaagtagtggggagaaggaatattattatttttgttttagagatgaagagtttgaattattaaggtgttgtttaaaaggaaggttatagtttatgaagggaagtagtaatggaatattgacgtttagttgatttttgagtagatgtaataaggaggttaggttgggtttaaattgttaaaaaatcggaatttattttttatatttttgtagagaaaaggatgggtttttatttggtttaaataggaggtgggttgattaaaataaattgatgtagaagttaatttaggttttttttttgtttagatgggatttttttattattttgattttaaggttagatttatttgaatttatttaagggggtagtatttagatattgaattaaaggattatttttttaagatattattttaagatttttttttttgtttgtttttttttttttcgtttttagtatattgattattggggattttatttggtttattttggtttagtttttttttttttttagaggaagttgggtttgattgagatgatgttatgtttttgaattttttttttcgaagggttttttttatttagataaatatttttgaatttttttagatgtggagtgagatttgttgttagttttgaggatagaggtgtttgttttagaagagtaaagtaattttggatttaagttagttattgatttattggggttaggttcgtagttgtagtagtttttttatttattattaggtcgagcgttgtggaatgagtagtaggatttatttgtaaatgagaaagggattttaattttagagttagggttttgattttagggtgagtagagtattttttgagatattagggggataggataagtgggagggtagaaagattaaattgagtgattggaaatgtttgagttggtgtagagtaaggggatattttagttaggggtttggagttaattttggtataaatattgcggtatagtagggagagtgtattttttaggtttatagtttttagagttttggaggaatgatatttatgagagttaagattgattatagatttttttttattttgtttttttatatatatttatggtattaaattattaaatattgatttttttttatttgattttttgatttttaattttgtaggggagtagtaggagtttattagttagtgagagtttgttatattttaagagataattgatgaaatttttatttttttttattttagatgggaggaacggtttttatttataaggttataagaattatagtataatttaaagttgaataaaaagtttttttttgttgtttattttttagtttatttttattaattgtgtttttttagggattttatttgatttttagttattttagttgattttaatttatgaattgggagtaagggaggagataaggttttaagaaattagtaaaatgaggattttaagagatgttataaaatttatgtagtaaaagttatatattgaatttttaggtatttttttagagttaattatttttgttttatatataattttaataattttggttatttgatattttagttaaagttgaaacgtaggaagagtttattagaagtaaataataaggagaagtaatagttgaaaattaagaaatagaaataaatgaaaagtagatataagtatgaaaatttatattagtttttttgaattatttatggtaggagtgaataggttagatatttatattttaataagtattaatgatgttattgagttgtaatatagttacgatatgtttatgatatatttgagttataaagtttttttcgggggggtattttaagaaagtaaagatatgtgtaatatattttgaaaatatttttatttgttattagtaaattgaagatttttttgttttttaaagtgagtttgtaaatttttagcgatttagaaagttttgttattaaaataattaaatttttatattttaagagattgagtttttttatatttggttttgttttttatagttttttttagtttttttttggtgttgttttttgattttttagtttgttagttttattttgtttatgtttttatattttagtatttggattaagaggagtattttgaaggagtttttgggaattttagtttatagagttatagaattaggatgaagggatatgttagtttttgttaggaagtaggtcgttgggagttatagattgtattattaggaaggcggtatagtttagagataaagagtttaggttttgtagttagataggttatatttaaaggtttttttattatgttttagttgtggtttgggaagttattttaattttgtaaattttatttgtaaaatagagataaaagtagtttttatgttttagttgttttgaggaataaaggagttaagaagtagaagtagttattttgtttggtaaaagtttaagaaatagtggatattttttgttttaggttttttttttttgttttttagtgggtatgagatatttatttttgtgatttatttgttataaaattatatatgttgtttttttaggataggtttaattgttattttagtaagaatataaatttttaaagtgttggagttatttttatttttatgtgttttatttttggtgtttagtataatttttggagtttaggaaaagtaataggattggaggataattgtggtaggtgtgtttttgttagttatttttagttatggtagttttgtttttatgttatattttaagggggaattaattaaattggggagtgtttatgtgaagataattaggattaggagagttttagaaattaagttatattgttgagggtttagtgttattttatttagatggggggttggtaaattatggttagtgaatttaatttgatttaggggttgtgtttgtatggttagttagtaaagaatggtttttatattttttttttttttttttttttgagatagttttattttgttgtttaggttggagtgtagtggtacgattttggttggttgtaattattgttttttaggtttaagatatttttttgttttagttttttaagtagttgagattataggtatgtgttattatgttcggttaatttttgtatttttagtagagacggggtttagttatattggttaagttggttttaaatttttgattttaggtgatttgtttgtttcggtttttcgaagtgttgggattgtaggtatgagttatcgtgcgtggtcggtttttatatttttaaaagtgtcgtaagataagataaagtagattatttattagaaattatatatggtttttaaagtttataatatttattttttggttttttatagaaaaagtttgttgatttttgatatggaaaagaagaatttggggaggaaaaataaataattttttttaagatgtatgttatttatattggttgagtatttttaatttgaaaattagaaattttaaaatattttaaaatacgaaattttttgagtgttaatatgatgtcgtaagtggaagattttatatttgattttatgtgataggttatagttaaaatatagttaatattttgttttatttataagtttattaaaaatattgtttaaaattatttttaggttatgtatataaggtatataggaaatataaatttatgtttagatttgggttttattgttgagatattttattatgtttatatagatattttaaaatttgaaaaaatttgaaatttgaaatatttttggttttaagtattttggataagggatatatttattttgtgtatttatttttatttttttgtagtgttagtgatgtgtaaaggatttcgtttagtgttgtggagagtataaaatgagagttggattttttttttttattaggtgttagtgttattgttatttaaattaattttttaaggagtttgtaatttagtggggtttattagaaatatttttaggtattgttatgaaggattagattaaatttgtattagtttaaagaatagaattagaattaatgattagaagttatgggaaggttaattttattgtaatttaaggaaaaagtgtaaaatgatgtagttatttataagaatgaaatgagttattttgggagataagtgatttatttatgttttttgtaaatatttaggaggtattcgtgttagggggttgtttaattttgaggtttattatgaattttagttattttagattagaataagggattgagtagatgtttttttaagttttaaaggttaagttaaggtgtgagtatatataaattaagggtttgtggtttgagggtttttagtgtatcgagatttttgttttatatttaaatagtatgttttggttagatattatggtttacgtttgtaattttaatattttgggaggtcgatgtgggtggattatttgaagttaggagttcgagattagtttgattaatatagagaaaattcgtttttattaaaaatataaaattagttgggtatggtggcgtatgtttgtaattttagttatttaggaggttgaggaaggagaattgtttgaatttgggaggtagaggttgcggtgattcgagattatattattgtattttagtttgagtaataagagagaaatttttttttaaataaataaataaataaataaataaataaataaaatagtatgttttggattttatttatttattgtggaattttaattattttgaagattttttgggtatttatatttttttttgttatttttttttttattttattagtattatagatttttgggttgtggttttatggtttaatggttttttgttcgtattagtatattattttatcgtaagttagttaaggtaaagtaagttattttattttttttagagagttattaatataaggttagtgtgtgtagttagtatttattgaaaggttgagggtatggaacgagattatagggtagtttaggggagataatggtataattttgaaatattagatattattgtgttaatgaagttatgtattaaaaaaaaatttttttttaggttttttttattttttatttattattgttttgttatgattttaggtatttttttattttttatatgttttttttgggttttggagttttattagttttgtgttttttgtgtttatttaaatataaggttttattttattttattatgtttagtaatttagttttttgtttatttttgtttatttaggattgtttggggttttaggttttgttatttaaagattttttaagatatttttttaaattagttgtttagggatgttatttttttttaagaagtattagtttgattttatttttttaaataaagaagaagtttattttttaattaagtttaaaggtttttttcgttgtatttgaagggaagtaatttatttcgacggattttaagagtataggtattaagaagtatatttttatatgtatttttatttgtttgtttttttatttttttaatatgtacgtatttttttttttagtataacgtttagttttgggattaaaagttatagataatatgtttttatttattagttaaggagggaagagaatgtttttattagagaagtttaagtttataaaaatatggaatttttatagttttggcgattgtgagaatttttttttggagggtggtgttgtgttttttttttatatttttttatttttaattttttatattgtaagttatttagttagattaattaaagttaatgagagagggaggtttaagtatttgagagtggagttgggtaattatttagttttgaaagtaaatttaggttttttagtttagggtttaaaggaaattaggtaatgagattaacggtaagaagtggaatttgttttttatttttatttgttttcgtaggattttgtagttgagtttatttgttgtagtttggtattttttgttttaagttttttgagataaagattgcgaaggaaggagatgaggataagggaatgaggaggtttaggaggtggagttaaagggataagaaaaagaggttttaggtttttgtgtgttttattagtcgaatagaaatgttgttgaagatatgtatttgtaaaggtggtgttaattgggttgggtttataagtgcggagtattggggattattgaattagttagaggtttttaagtttgttttttttttgtcgttatatggtagagatttaaagggtggagtttttttttttttggaaaatagttgataaaattttttttttttttatttttttttttttatatgtagttttggataggatatgggtgtggggttagtaggtacgaaggatttaaaggaagaagaggaatgtgacggggagggtttgggggtgttgttagagtgaggatagggataggttttggaaagtttggaggaaatagatattttgagtttgataaaggggttttttaattatttgaaaggttttttgttttagttagtattttggtagtgttgtttggtggtttttgagttttttattttgattttgttttgtgattttttttatttttaataaagatagtttatttttggttagttgtagtgtttatgtatatgttatttttttaaagggatagaaaaaaagaattttttaaaataagttttttgttggggtaaatgatgagaaaataaattatagaaattttttttattttaaattttataataataatagtatttttgtaatggttttatggtagtattttaaggtatatttagttattttatttattttataatgtattttaggattgaaaatgatttttagtattaataaaataaaataaatttaagtaaaaattttagaaagtttttgggaagggtataaaattataattggtttaagtagtttggtaaggttgggaatggggttttgtgttttatttttttttattaaaagttgggatatttttagtatattagtttaaagttttgttaaggttgtgttgtttttttaattttaatttcggtaggttaaggcgagattggtatttattagttgaggaaataagaaaagggtggattttattcggttgaggattaggttattataagttgtgtagttaaaggagaatggagtatttgattggaatttgtattattggttaatttatttttgtttttttgttttttgttttttgtttgtttgtttgttttgagaaggagtttcgttttgttttttaggttggagtgtagtgttaggattttggttcgttgtaattttcgttttttgggtttaagggatttttttgttttagtttttcgagtagttgggattataggggtgtgttattatgtttagttaatttttgtaattttagtagagatggggttttattatgttggttaggatggtttcgattttttgattttatgatttgtttgtttcggttttttaaagtgttgggattgtaagcgtgagttattgcgttcggtcgatttatttttgttatgagggtttagtttagtatttattttagaattttgaaattttattgatagtttttttttgttttaaagtatatatttaggattgttaaatagggtaatttaaaattttttttagagttttttttagtttaggggtagttgtttttagttgggcggatttaaagatggataatagaggagattgggaataaagaggtttagtttaggttattttgtagggttatagtgggtggtttttaggatgtagtgagagtatagaattgggagttttagagtgttgtaagtaaaagggagagtaatgtataaagttttaaaagttttaaattttttaagtgtaaagagatgaggtggagaatgttattttttaaggaaagtaatcgagtataaatatttatcgggtgtttattttttttttaatcgaagtgagagtaagattttaagagtaaggatatgtgtaggtgagtgggggtagtgttttaatttatttattagttttagaatttggagtaggggtagaggaagaaaattttaaaaggtgataagttttgaaatttgtgtaggggtgacggtttttggtaaggcgagcgaggttgggcgtagagtaaattttgtttatttttatttttttcgcggtggggttgttgaagtgggaatttaaatttagttttttaattttaaatgtaaggtttttgtttggttggttgtttggttttgttttttttttttacggattgtttatttcgaatatttttggtttgggatttggagttttatttttgattcgtttttttcgaattttttaatgtttatttttggtttttttagtttttgtgtaaggtgggtatatcggtttttttttagtaattcgtttcgtgtttatattttttgaattaattaagagttataaaattttttttgttttttttttttttagtttttcggttttggttgtaatttcgtatttcgcgtttttggtaattagaagagattttggtatttttaaagcgttttattttagtttattggaattagtcgtgttgatcgatttatatttcggttaacgtatattcgcgggggtgatggtttttttttttttttttattttcgttagtttttaggtgaggcgttggtttcggggggaagtagttgtgggcggtagtgcgtgggttgggtaggggtttttttttttcgtgagattttgttttgttgtttagttttttagaaagtttttatttttttcgcggcgaagttaagcggtcgcggcgcgcgggcggtatttacgtagtaaatttagtaagtaaagcgcggtttagtttcgcggtattttgggttttgcgcgcgcgtttttgcggattagtatttttttcgcgcggtttttagagagacgtatcgagtggaagatattattcggtttggttaggacgcgtttttttcgtttttttcgttcgggagaggggtgggggatttttgttttttttttttttttttttttttttttttagttttggtaaggtagcgtttttttttggttgttattaatttgagtttttttggttggttttaaaggcggagggcgttaggagggaggttgggttgtcgtcgtcgaggttaaaaaaggtggaggtttgttcgggttttagatgtttcgtttagttttttggagaggttttattttatttttttaagttttatttttatttaatttttaatttttttgtggtagttttgtcggtggttagggtaggggtaagtttttttcgattttttttttatttttttttttttgtgatttttttttatttttaagttgtaagttagtaataattttgtaaaaggaatttattgtaaggattttagtttagaagtgtgagtatttcgttaattaggtaaaatttaattataatgtggtatatttagtgatagttttattagattttgtgttgtgtgtgagtgaagcgttaggagtgagtaggtatacgtgattataagtatttattttggttgtttaaattatttttggagattttttttttttttttttttttttttttttttttgtaagatttttttgtgttatgttaattttttgttaatttgtgttaattttttttgtgattttttatatttttttatttagttttttattattattattttaaagaaaaaggatttttttggatgttttttttttagttattttttttttagttttgggtttaagttattagggattttattttgtttttttattagaaaaaggattttttgtgattttattttttattatttgatagatttttgagttttttgttttttattagtttttttgggtgttggttgtattgaatagaagaaattttgagtcgggtaggtagtttagttttggggacgtagagacgggagaaaggagaagttagtttgggtagatgatggtattaggggaggattagataaggtataatttgggagaggttgttttgatatttagagtagaattatgaaattataaatatttagtttaggtttttttatgatgtttgtattatatagtttaaagggaaaaaagagaagttagattagtattttgtggttttttttgattttttcgtagatattttagtattataaaagtagttttatttttatagtttattttaaatttattatgcgttggggttgtataggagaaggatttaggtttaaaaataaatttaaaatttttttattttggttttgttgtttagtatttttttaaatagggaataaagttttttattatataataagagtaaaggtttgatatgttaatttgattgaatataacggaatggtatgaatttgttttaaagtataaatgatgatttagaattgattatatagtgatggtaagggtttggggatagaaggagtggtaaatatgtattttaaaattagttattggtttttgggatttttaattaatagggaaaaggagttagttttaatattgttaggttttttattttttttaatttttttagttttagggatcgttgggtttgttttaggtatttagtgtgtagttgagaataaatgtggggttgtaatttttgttagatatgaaagttaatttggtttattttaatttttatttttagattttttttttttggttattttaaatattatttgttttttatagttggattacgggaaataggggaaataatttgtttttttttagtatttgaattttttaattagttttgggagtaaagagagagagaatgattttgtggagtagagtttttttaaagtatggtttatatagaattaagggtgagggttagaatttgtattttgagtaagtattttttatgatttatgtatattgaggtttaagaagttttggtatagaaagaatatttgttgggtataaggagtaagggcgaagtggatgttaggttttagggaggaaaaatagaagtaggggatatgggaggttggtaaatttttttttttgagagattagagttgttttttttttggtttgtaaaggttatggatagttttagaattataaagttagatagtgattggttattttttatattttttagggttattgagatttattattttaagtatatatatttttgtttaagttatttttaaatatacgttttggttattggatataagggtatttagggattttagttttatatttttttataggttaggtagagttgagttatgtagtttttttaaagttttagtttttttgggttgttttttaattttttgtttttttgttttataagttgttgttagaagatgttagttatatcgtataaaatggaggatataatagaaatatattgagttagaggttgttttaggttttttatagatttttggaggttataattatttttattattaaatattttttattttatttttttttaaaatatatacgtattatgttaattaatttaaaagaggattttattttatgttaaatatgtttgatgttaaaaaagtaaggaaaatggttgttataattttgaattttaaaatatatttattttgtttttataatttaaattttattatatttatatgaaattatgaaagagttgaattgtagtttataagttgagttgatatttttgtaggtatttaatgaaaaatttgtgaattttgattttttaattttatattttggaattaagattttttttttatattgtaaattttttttttttttttttttagtttggtagggatttttagcggtagaagtgtttagatgttggattgatgtagtgataatttgtaagtttttttttttttttttttattttttagtttttttttagtgtttttttttggtagaatttaataagaaattagttgataagggagtttgggaattagtgttttgtggtaagttattatgatgtaatgtttgtttttatgataggtaggttattttagaggttatagattaggaagatttagattaaattatgatgattaaattataagggttatggaatttatttaaagtatagagttagaattaaggggatagatttatataaggttgatatatttgggaatgtaagtagggtaaaagttttgtatagttttatagttttagttatgtgtttcgttttgtagtggtatagttatgaggattagaattgagattgagtaaggggattaatatgaggaagatgtttagaattaaggtatatttattttattgagagatgtttaagggtaggtaggtttggttataggtttttgttagtgttttgggaagttatattttttgttagtattttttgggtagagtttatggggggttagaaggtgttattagtaggtagttaatttagggatgatatggatattagttagaaggtggtataatttatattttatggtttatgatttgtttttttttatttttttttgtttgtaagtagtatttttgtttgttttatttttttgtagtttattttatttattttgttttatatgttttgtaggttattaatttattatagattgagaattttaagtttgaaatttgaaatgttttaaattttgaaatttttcgagtattgatatggtatttaaaggaaatgtttattgaggtattttggattttagatttttggaatggggtgtttaatatataagtgtaatgtaagtattttaaaatttaaaaagtatttcggataagggatattttattttgtatttttagtatattttttgaattttgtttatgttttataaatgatttgtttattttgtatttatagttaatatatttgatgagttttatttatttgttttttttgttttttgtatgaaattgaatatttttatgtaatagagtaaatatatattgtagttagtattatagagaaaagtatagaggagtgaggttggggttgagggagataaaataaataattagtagaaaattagttttatgtattttttatatagttaattatttttttagttgtatttattgagtagtttttttttttttttttgatttgatatgttatttttgttatgttttatattttatacgtatgtgggtttggttttaggttttttagtattggttagtatggatattttaagtgttttcgttattgttttatttattgtagtattaaataagtttagatatttgtagggtaagttttttttttttaaattgtttttagaaatgttttgattatttttggttttttgtttttttaaataataataataatatataattttataaatgtttattagatttttttttaaaatagttttttggattttgattaaaatttttttatagattaatttggggagaacggaattttttttttagagaatttggtatatatttttattgtttgagtttttattaaagtttataattttttttgtaatggttttaatttatttattattgttaagtgataaatttatttaatttattgttagatttatttttaggtaatttatgttttttaagattatggtaaatattattttttttttaattatttttgttgttggtgtatgaaattgtaatttattgttttatattaattttttattgagttattttattaatttattttattagattgaagtatttttagattattttgggttttatatgtaaatgattatattataagtaaatagtgataattttatgttttttttttaatttttttgtaattgatttgttttatttaagttaatatattggtaagaatatttaaggatagaaaggagtggtgattatgtatatttttattttattttagattttgaagtgtaagtttttaatgtttttatatttgtttaattttttaaatgtgttttttatttatttagttattatttttaaattattattttattttagag

SEQ ID NO: 23 - DNA, 6298 bp, Artificial Sequence
  chemically treated genomic DNA (Homo sapiens)
agaaagattaatagtttagttttggatagaatgagtttgtattgtttatgaaagtatttaaatgtaaatgttgttttttttaataattttttggtttttttaggattttttagttatgagtttttttattttttcgtgattttttattttttttttgttttcgttttagtttttgtgggatttagatgttatggattattattaaaattttatttttgaggagagtggatggtttgaatttaggagtttgaaattagtttgggtaatatggcgaaattttatttttataaaaaaaatttaataagttgtggtagtgtatatttgtagttttagttatttaggagattgaggtaggaggatcgtttgagtttaggaggttaaggttgtagtgagttacgggtttagtattgtatttagagtttgggtgatagagtaagagtttgttttaaataaaataaaataaaataaaaataaataaataaaaattaaaaataaaataatttataaaaattaaaaataaaatttatttttgtttaaagtttttatttttttgacgttttttttttcgttatatttattggtgttaggggttgaatggtgtatattttaaatttatatgttgaaattttaatttttagtattttagaatgtggttgtatttgaagatagggtaatagttttaaaaaggtaattaagttaaaatggggtaattaaagtgagtttaaatttattatgattggtgtttttataaaaataggaaaattggatatagaggagtttatcgggaagattacgtgtagatagagtgagaagatagttatttataagttaaggagagaggttttagaagaaattagtttggtgacgttttgattttggatttttagtttttagatttgtgagttaatatatttttgttgtttaagttatttcgttgtggtattttgttatggtaattttagaatataaatatatatagtaaattttaattttgttaaatttaattttgtttatttttatttttttgtttaaatagtggggagtggttgggtaaaagaacgtaatttattaatcgattttttaaaaaatttttgattatttgatgatattttgagaatttatagtttatttgtttttttggtttttttttaggtttattagtattttattaatttttagaagatgattttttttttttattttattgaaaagtagtagaaaagtatatttatattattattattaaatttatgaattttttaatttttaaagttgtgttttttattttttttttgtgaggtggtggagtttttatttatatttttatttgtgtttcggatattttttattaatatatgagtttaggagtttaagattagtttgggtaatatggtgaaattttgtttttataaaaataaataaataaataattgtaaaaaattaattaggtttatggtggtgcgtgtttgtagttttagttattcgggagattgaggtaggatgatcgtttgagtttagtaggttaagggaaattattggagtaattgttaattgtcgtttgtttattgggttattttagtattttataaatatattgtgataattttaatttagaataaaatatttttttttgattgtttagtattttttagttatggttttatttttcgattttattttatagaaaagttttttatatatacgtaaattttagttaatttattgatattatttatttttttatatatttttttaaatttgttgtgggtgggttttgtttttattttttttttaaaatgattttttttgttattattattaataatttttagggtatttttttttttgttttagggattattttttttagttttttttgttgaagtttttttatttttttggtttttgttataggagtagtttatggttgagattttgaaatttttttgtttttgtatatattttttatatgattttatatatatatttttggttttaagaattgtttatatttaaggttttttttattagtgtttttagtattaattttttgtttaaattttagaagtttatatttaagtggttttttgatgttttttgttgggggtttaatagatattttaaatttagtatattaaaaattaaatttttgatttatgtttttttttaagattaaatttattttatttttcgtttttttattattgtagattgtagtgtttttttttttttggttagttatataaataaaaaattttggtattatttttgatttattttttttttgtaaatgttatatttaatttattagtaaattttgttgttgttatttttaaattttatttagaatttatttttttttttttttgttatttttattattgttattatagttattgtaattgttttttatttttatttttttataatttatttttaatattaaagttagattgattttttaaaataatatgttagattaagttatttggtgatttgtatgggtaaaaataaaatgtatacgaatgggttaaaaataaaatttaaaaataggtatatagattaatgaaatagaatagagattttagaaataagatttatatttataattatttgatttttgatagatttgataaaaataagtaatggggaaaggattttttatttaataaatggtgttgggaaaattggttagttatacgtagaaaattgaaattggattttttttttatattttttttaaaaattaatttaagatggattaaagatttaaaatgtaaaatttaaaattataaaaattttagaagaaaatttaggtaatattatttaggatataggtatgggtaaagattttataatgaaaatgttaaaagtaattttaataaaagcgaaaatgataaatgggatttaattaaatttaggaatttttgtatatcgaaagaaattataattagggtgaatagataatttatagtatgggagaatatttttaaaatttatttatttgataaaggtttaatatttagaatttataaggaatttaaattaatttataagaaataaataattttattaaaaagtgggtaaaggatatgaatagatattttttaaaagaagatatttatatagttaataaatatatgaaaaaaagtttaatattattgattattagaaaaatgtaaattaaaattataatgaaatattattttatgttagttagaatggtgattattaaaaagttaataaataatagatgttggtgaggttgtggagaaataggaatatttatattgttgatgggagtgtaaattagtttaattattgtggaagatagtatggggattttttaaagatttagaattagaaatattatttgatttagtaattttattattgggtatatatttaaaggaatataaattattttgttataaagatatatgtatgtatatgtttattgtagtattatttataatagtaatgatatggaattaatttaaatgtttattaatgatagattggataaagataatgtggtatatatatattagggaatattgtgtagttataaaaaggaacgagattatgttttttgtagggatatggatggagttggaagttattatttttagtaaattaatataggaatagaaaattaagtattgtatgtttttatttataagtgggagttgaataatgaatatagggaggggaataatatatattggggtttgttggggagagtggagggagggagagtattagaaagaatagttaaaatatgaggggtttaatatttaagtaatggattgataggtgtagtaaattattatggtatatatttatttatgtaataattttgtacgttttgtatatgtattttagaatttaaaataaaataaaaaagataaaaaataaataaaatatatagtttaaaaagttattttgttttatagagttatgggtgatttggttttttgttatttttcgaatttttgttttgttttttttaattttttagtttaattataattggtttttttgttgttttggaataggttaagagtttttttgttttagagtttttgtatttgttattttttttgtttgggaaatgtttgttttaagggagttgggtgatttgatcgtttatattatttaggtttttgtttgaatgttatagatgtttttttaataaagaagaggtaagaaaagttattttattatttattaaattttcgtatagagtgtagtattattattgtgtgttagattttgttttaaatatattttatggattataaaattgtatttttgagtagtttttagagttggtagtaataatttatatttattgggtgattattatgtgttaggtattgtgttaaatacgttgtagatattaatttatttaattttcgtaataattttatgaagtaggtattgttattatttcggttttatatttgaagtatagagaggttaagtaatttgttttatgttatttagtaagaattaaatttgaatttagagtttagttattgatgttttttgagagaaggagttagatttaagttgagtttttaaaggtggttgattaggtatttgttagagttaagaaagagaggtaggatatttttttttaggtagagggtattgtgtgtatatacgtatagaagtaggtagtttatttttatgttttttaggaagtaaatgtggtttaggtgtaaagtgttcggttgatgaagggagttagcggagggagtataaggatgtattgtttgtttttttaggatatttgtagaggattaaggtggttgtttttttttggaggtggagtgggtgggttattgtataggagtttatagttgttggttttttaaatttttattggtgtaattagttacggaattttgaggtaaggggttgggggtgggaagggaaatagagaaaaggtaagtgaaatagaaggggaggtgtagttttagaatttagttagttttttttttgttgtttagttttttgtcggttttattttcgtttagttaatttcgtttggagttttatggttaattgcgagtttagttcggtgttcggggataaattttgttgtcggttttttaggagagtttaattttgttttggcgttagtattttggttttgattttcgtcgtggtgttcgcggtggtcgtttcgaggtggcgttagtagtggagcggttcgggtattattaagcgttttttcgagatcgttttggcgcgatgcgttaagtatattgaaatttattttgagatgaggtgggttggcgattaaggcgtatcggtgggtattgcggggatagtagggtttcgcgcgtagggaagtcgttcggatcgttcggaatcgggtatttttcgtggcgggttagtcgagagttcgtcgggtggtgttgagtagggagtttcgggttcggggtttcgcgggtcgtttgtaggagtagttggttttggtatcgagcgtgttcgcgggaggcgggggggggtattgttcggtggttttgttggcgtagtcggtgaatatttggtatcgatgttcgttttttgggtaaggtgttttgagtttagtttttcgtcgggttgtagtttattttcggcgcgtttagttcgttttatcgttttagggacggaatagaattcgtagatgtagggtgtcgttgatatttttaattttttttgcggttttcgttcgttgtttttgattcgaaagtgttttcggatatttaagaggatatttaagtggtttgtaaagtttgtggtaggggaggagggtgtagaagggttaaattacggaatttagttttatttatttatataaagtagtatttcgattttttttgcgcggtttgaaatgtatgtgattagagaagtaattaataaaataatgttaatttttaaaatcgagatattatttagatgataaggcgtagtaattcggtgaatttgtataaattttggaaaaaaaatatattagtttatgggattttttagtttttttatgtttttttttagttattaattttttttaaagggaataattattttttggatttgatttttaggtttcgtttttatcgggaaattatcgttgtttgtaaaatagaagaagtcgggaaggtaggtagggggagttgttattttatattttgtgttttgggatagtaaaatttcgtatttaagtaattcgaggaaacgagtaaatagatttttttcgttttttcgagtatatttaatagtttcggttgtaaaatgtttgtttttt

SEQ ID NO: 24 - DNA, 6298 bp, Artificial Sequence
  chemically treated genomic DNA (Homo sapiens)
aggaggtaaatattttgtaatcggaattgttgagtgtgttcggagaggcgagggaggtttatttgttcgttttttcggattgtttaaatgcgggattttgttattttaaagtatagagtgtaaagtagtagttttttttgtttgttttttcggttttttttgttttataagtaacgataatttttcggtgaaagcgaggtttgggaattaaatttaaaaagtggttgttttttttaggagaggttagtagttggaaaggagtatgagaaaattggaaggttttatagattaatgtgttttttttttaaggtttgtatagatttatcgagttgttgcgttttattatttaagtaatgtttcggttttagaagttgatattgttttgttaattatttttttggttatatgtattttaggtcgcgtaaaaagaatcggagtgttgttttatataaatgaataaaattaagtttcgtggtttggtttttttatattttttttttttattataggttttgtaaattatttaagtgtttttttaagtgttcgggggtattttcgggttagagatagcgggcggaaatcgtagaaaaagttgaaaatgttagcgatattttgtatttgcgagttttatttcgtttttgaagcggtgaagcgggttgagcgcgtcgagggtgggttgtagttcggcgaggggttgggtttagggtattttgtttagaaggcgggtatcggtgttaagtgtttatcggttacgttagtaaagttatcgagtagtgttttttttcgtttttcgcgggtacgttcggtgttaaggttagttgtttttgtaagcggttcgcggagtttcgagttcgggattttttatttagtattattcggcgggttttcggttgattcgttacggaagatgttcggtttcgggcgattcgggcggtttttttgcgcgcggggttttgttgttttcgtagtgtttatcggtgcgttttagtcgttaatttattttattttaggatgaattttagtgtatttgacgtatcgcgttaggacggtttcgggaaagcgtttggtggtgttcggatcgttttattgttggcgttatttcgggacgattatcgcgagtattacgacgaggattaggattaggatattgacgttaagatagagttgggtttttttagagagtcggtagtagggtttgttttcggatatcgggttgaattcgtagttggttatagggttttaggcggggttggttgggcgaagatgaggtcggtaggaggttaggtagtaagagagaggttggttgggttttgaaattgtatttttttttttgttttatttgttttttttttgtttttttttttatttttaattttttgttttagagtttcgtggttggttatattaataagagtttaaaagattaataattataggtttttgtgtagtgatttatttattttatttttagggagaaatagttattttaattttttgtaggtgttttaagggggtagatagtatatttttatatttttttcgttaattttttttattaatcgggtattttatatttgagttatatttgttttttggaaagtatgagggtgggttgtttgtttttatacgtgtgtgtatataatgttttttgtttggaaaaggatgttttattttttttttttaattttgataaatgtttggttaattatttttaaagatttaatttaagtttgatttttttttttaagaggtattagtggttaagttttgggtttaaatttagtttttgttggatgatatggggtaagttatttaatttttttgtattttagatgtaaagtcgggatagtagtagtatttattttatgggattgttacgaggattaagtgagttaatatttataacgtgtttagtataatatttggtatatggtaattatttagtaaatgtaagttgttattattagttttaggagttgtttagagatgtaattttatagtttatggaatgtgtttgaagtagggtttggtatatagtaataatattgtattttatgcgggagtttaataaataataaagtggttttttttgttttttttttattaagagaatatttgtgatatttaagtagagatttaagtaatgtgagcgattaagttatttaatttttttggggtaaatattttttaagtagaggaaatggtaggtgtaaagattttgaggtagaaaagtttttggtttgttttagagtagtaaggaggttaattgtagttaggttagagggttgagggaaatagaatagaagttcggaaagtagtaggagattagattatttatagttttgtaagataggatgattttttggattgtgtgttttatttattttttattttttttattttgttttaagttttgggatatatgtataggacgtgtagagttgttatataggtaaatgtgtgttatggtggtttgttgtatttattaatttattgtttaggtattaagttttttatgttttagttattttttttgatgttttttttttttttattttttttaataggttttagtgtgtgttgtttttttttttgtgtttattgtttagtttttatttataagtgagaatatgtagtgtttggttttttgtttttgtgttagtttgttgaggataatggtttttagttttatttatgtttttgtaaaggatatgatttcgtttttttttgtggttgtatagtattttttggtgtatatgtattatattgtttttatttagtttgttattgatgggtatttgggttggttttatgttattgttattgtgaatagtgttataatgaatatatgtatgtatgtatttttataatagaatgatttatatttttttgggtatatatttagtaatgagattgttgggttaaatggtatttttggttttagatttttgaggaatttttatattgttttttataatggttgaattaatttatatttttattaatagtgtaagtgtttttatttttttataattttattagtatttgttgtttattgattttttaatgattattattttgattggtatgagatgatattttattgtggttttggtttgtatttttttaatgattaatgatgttgagtttttttttatatgtttgttggttatataaatgtttttttttgagaaatatttgtttatgttttttgtttattttttaatggggttgtttattttttataaattagtttaagttttttgtagattttggatattagatttttgttagatggatagattttgaaaatgtttttttatgttgtaggttgtttgtttattttgattatagtttttttcggtgtgtagaagtttttgagtttaattggattttatttgttattttcgtttttgttggaattgtttttgatatttttattatgaaatttttgtttatgtttatgttttgaatggtattgtttagatttttttttagggtttttatagttttgggttttatattttaaatttttaatttattttgagttaatttttgaaaaaggtgtaaggaagggatttagttttaattttttgcgtatagttagttagtttttttagtattatttattaaatagggaattttttttttattgtttgtttttgttaggtttgttaaagattagatggttgtagatgtgagttttatttttgagatttttattttgttttattggtttatgtgtttgtttttggattttatttttaatttattcgtgtgtattttatttttatttatataagttattaaatgatttgatttggtatattattttaaaggattaatttggttttggtattaagaataaattgtaggaggataaggatggagaatagttataatggttgtagtagtagtaatgaaggtggtaaagaaaaaaaaagatggattttgaatagagtttgaaggtagtagtagtaggatttgttgatgaattggatgtagtatttgtaagaaagagatgagttaaagatgatgttaagattttttatttgtgtaattgattaaaggaaggaaagtattgtaatttatagtgatgggaaaacgggaggtgaagtagatttggttttgggaagaggtatgaattaagaatttggtttttgatgtgttaagtttgagatgtttattagatttttaataggaggtattaaggagttatttgggtataagtttttggagtttgggtaagggattaatgttggagatattaataagggagattttagatatggatagtttttaaagttaagagtgtatatataagattatgtgaagagtgtgtgtagaaatagaagagttttagagttttagttatgggttatttttgtgatagaggttagaaagatgagagagttttagtaaagagaattgggaaggatgatttttgagataagaggaagggtgttttgaaagttattgatgatagtgataagaggaattattttagaggaaagatgaggataaagtttatttatagtaggtttaggagagtatgtgagaagataagtgatattagtaagttagttggggtttgcgtgtgtgtggagagtttttttgtaaaatgaaatcgagaaataaagttatagttagaggatgttgggtagttaggagagaatattttgttttaagttgagattattatagtatgtttgtaggatgttgggatgatttagtaggtaggcgataattggtaattgttttagtaattttttttgatttgttgagtttaagcgattattttgttttagtttttcgagtagttgggattataggtacgtattattatgggtttggttaattttttgtagttatttatttatttatttttgtagaggtagggttttattatgttgtttaagttggttttgaatttttggatttatatattggtgagaggtattcgaagtataggtgagagtgtgggtaggagttttattattttatagaagaaagatggaaaatatagttttgggggttgggaggtttatggatttggtgatgatgatgtggatgtatttttttgttgttttttagtgaaatgagaagaaaaggttattttttgagagttggtggggtgttggtagatttggaaggagattaggagagtaaatggattgtgggtttttagggtattattaagtggttaggaattttttaaaaggtcggttagtaggttgcgtttttttgtttagttattttttattgtttaaatagaagggtgaaagtgagtagagttggatttgatagggttggggtttgttgtgtgtatttgtgttttagggttgttataataaagtgttataacggggtggtttaagtaatagaaatgtattgatttataggtttggaggttagaagtttaagattaaggcgttattaggttgattttttttgaggtttttttttttggtttgtaagtggttgtttttttattttgtttgtacgtggttttttcggtgaatttttttgtgtttaatttttttgtttttataagaatattagttatagtgaatttgagtttattttaattattttattttaatttaattatttttttgaagttattattttatttttaaatatagttatattttaaggtattgagggttaggattttaatatatgaatttggggtgtatattatttagtttttaatattagtaaatataacggagaaaaaaacgttagggaagtagaaattttaagtaagaatgggttttgtttttggtttttatgggttgttttgtttttggtttttgtttgtttgtttttgttttgttttgttttgtttgagataggtttttgttttgttatttaggttttggatgtagtgttgagttcgtggtttattgtagttttaattttttgggtttaagcgatttttttgttttagttttttgagtagttggggttgtagatgtgtattattataatttattggattttttttgtagagatggggtttcgttatgttgtttaggttgattttaaatttttggatttaggttatttattttttttaaggatgggattttaataatggtttataatatttaagttttatagaaattgaagcgggggtaaaagaagggtgagagattacgaaaagatgagagagtttatggttgggaggttttgaagggattaaagagttgttagaaaagataatatttgtatttgagtgtttttataggtaatgtagatttattttgtttaaaattaaattgttaattttttt

SEQ ID NO: 25 - DNA, 5883 bp, Artificial Sequence
  chemically treated genomic DNA (Homo sapiens)
  unsure (1678, 1758..1759, 1882)
ttttaaaagaagatatataaatggttaataaatatgaaaaaatgtttaatattattaattattagggaaatgtaaattaaaattatagtgagatattattttatttttttgtaagaatggttataatttaaaaattaaaaaataatagatgttggtatggatgtggtgtaaagggaatatttttgtattgttggtgggaatgtaaattagtataattattatggaaaatagtatagagattttttaaggaattaaaagtagaattattgtttgatttagtaattttattattggatatttatttagaggaaaataagttattgtatgaaaaagatatttgtatatatatgtttatagtaatataattcgtagttgtaaaaatatggaattagtttaaatgtttattaattaataagtggataaagaaaatgtggtaaatatatatatgtatgtatatatatatatatatatatatatatatataaatgtatatatatatattatggaatattatttagttataaaaaggaatgaaattatggtatttgtagtaaggatatatgatgtattaagtaaaataaagtagtattataaaaaatttgtttagtattattatatttaggttatatatatatatatatatatatataattatataaatatgtatttattattttttattatatatttatttgttatagatattaaatagtaaattgttaaaaagtgtatatttttagaggatggttagattaaggagggatttttatttttaatttgtattatttaaattttatataataaacgtgtttttttttaataagttagtattttaaagatatttttattttgaaggaaaagaaatgaatagggaaattttatgttttgagaaataaataagagtaagattttgagatgttagagggaggtttttgaaggttatgggaaattttttaagagtcgatggtatgtagtgttttggggggttggaggtggtatggattaggaggttttgttgatttgatcgttatgtattttattgaaggtttaatatgttgttaaatttattttatagaaatttgttgtttgttgatttgttttttataatttgtatttattttataaagtaaatgttattatttagtaaaagtaagagagtttttagatgtttattttattgagatttttgttaatagaataagttttaggattaattttagaaagttttttgaaatgtaataatttaaggaaatatttattagtgttttattatatgtttattataaaaaaattgtataaaaagtttaaagtaaagattaaaaggtttttttttttttttattttattattagtttattagaggaaaaatgaggaatagttgtaataaataggaagaatttttttaggtattagttatgcgaatttaagtatatataaatttatttagatttaatagagattgttgtgttttaggaattagagagagagtagttttttgttatttatttacggagtatttatatatgttaagtgttatgttagtgagggtagatttaattaagaataaggggatatttcgcgtttgttattatagagttggtattttagatagtaggtagatatgagattagtaatataaataaagggtaattcgattgtttgtaattaaaaggaattngttgggtaggtcgcggtggtttacgtttgttattttttaaaggttaaaatttttttttttttttttgggggggggggggnnaaaaaaaaaggggggggtttttttttttttttttttttaaaaaacgcgggtcgattacgaagttaggagattgagattattttggtttaatgcgtgaaattttcgtttttattaaaaatatanattagtcgggcgtggtggtaggcgtttgtaattttataaatttttattttttttataattatttttgtatgaattggtgataatatatatttaattatagtatttttatgatgttgaggagggtgcgaatttggataacgtgattaaaaaaaaaaaaaaaaattttttttttgtggggggtttaaaaaaaaagggggttttttttttttttataaaaggggaaagggttttatttatttatttataaaaagtattaaatgttgttaaaaggtttatgtaatatgaattaggggttaaaattatgtttttattattttatatttagtttggatgaattttaaatatttatgaagtgttagttattataatgagattttattttttttggttaaattagaagttgggtattagaataatttattttttattaattttttttttttttgatgaaatgtaaagagaatgagataattgttaaagtaattttttgtcgataacgtttgatataatatgattgaagtgattttgaattttaattttgtttaaaatagagaattgtggttaggtattgtggtttatatttgtaattttagtattttgggaggttaaggtaagcggattatttgaggttaggagtttgagattagtttggataatatggtgaaatttaatttttattaaaaatataaaaattagttaggtttagtggtgcgtatttataattttagttacgcgggaggttgaggtataagaattatttgaatttgggaggtagaggttgtagtgagttaagattacgttattgtattttagtttggatgatagagtgaggttttgttttaaaaaaaagaatgtaagaacgtagtaaaataggttaggtatggtggtttacgtttgtaattttagtattttgggaggtcgaggcgggcggattatttgaggttaggagttcgagattagtttgattaatatggtgaaattttatttttattaaaaatatataaattagttgggtaaggtggcgggcgtttgtaattttagttatttggaggtagaggtaggagaattatttgaattcgggaggtagagtgtgtagtaagttgagatggttttattgtattttagtttgggagataagagtaaaatttttgttttaaaaaaaaaaaaaaaaaaagaatttaatattttaatgtaataaagtagagaatcgttgttatagtatttattaaagtgtgttttttattgataagtttaagtatttgtttgtttgttttttttgtttattttttagttattttggattttttttttgattatttttttttttttttagttttgatgttttggtttttattttgtaattcgtatattattttgtggatatgttttttttaaatttttttttaaaataatagtataaaggtagttataaattaattgttggtttttataaaaaattttattatattattaaaaattagttttattataataggatgaatattagattaatatttattattagagatgtagtttaaattgattcgggagaagatatttattgagttttttatttagtgtaattagttgttattatatatgtaaaattttataattataaagtattttagaaataaagtattgttaaatagttttaaatttattaaagtataaaaaatgtattgagtatatattatgtggtatcgtgtaaagtaatagagatgtttaaattaaaaggttattttttgtttttattaaagtatgattgaaagttcgttggagaatatagtttttatatagagttaaaatagtttttcgggtttataaatttaatgatttatatggtataattggttttagatataaatttatatgttagataagtaatgtagaaaaattaagaattaggaaataggaaaatagatttatatttttgttttgttgtaatttatttattttttttaattatttattaaatatttattgagagtttatgttgtgagagaaattgtattaggtgttggggaatatggtagtaaataagagagattatgtatgtgagtatgagtaggtggtttaatttttttatatttttaattttttttagatttaatgtttgaggtattttttagatttgaaatgttaaggtttgtaatagttttgtggagggagaagttgttaagtcgttttgggatttgaggatttattttttttttaaaggattagtttttgttttgattttaaaataattttgttatatagtttaaaaataatttggttaggtttttatttatattggggtaattttgacggtttggatgtggtaatttatgtttattagattttaaaggtaggaagttaaagttgggaaatggtggatgatttttattaatttatagttaggtagcggtttttattgagtagtttttttgtggttttatttagttttttaattaataacgtagcgttttttgtaggaaatttatcgtttgggttatttgttgttttttgttttaatgagttttgagaaaggattgttggttatgggattagaggttttatggggagggaagaattgtttttgatttttagtttttcgagcgggttttaaggtaataatttttttattatttagttttataattgtagtaaggaatagttttttttgtttgtagttgagatgatttttttaagggagaaaaagggatttttataacgaagagagggagagagagatgaagagggagggagtaagggagagagggaagaagggagaaagagagagagatttgaatatatattgttttaaggatgtaaaaaattataatttggaaaaggtttcgagtaattttaggaaaatgagttgttggattttttagttaatttgttttttttagttaatgaaaaagatagggtttgaggtttttttcgaaacggggtcggttaatttagttttttttacgagtttaagggtttgttatatttttgtttttttgaggattttttttacggagacggattatagtaagtagaggttgggggggggaaagacgaggaaagaggaggaaaataaaagttgttatttatggaagatataaagggtaagattaaaattgatttgatttgaatttttaagaaaaaaaaaatagaaggaaaaataaaagtttagattaaaaaaaaagtattgaaagtggattataggagtatttataaatatatttaagaaaattgataatgtggagtataaatgttgtatttttaaaattgggaatttgtttattgaggttttatttttagttatgtatgataatagattgtattttaggttttaaattttgtaaaaataatttttttatgatatgtttatttattttgtaaataattattgtgttatatagtaagagattgtatttttatttagttggttaaagtataaaattattgatatggtttggttgtgtttttatttaaattttaatttgaattgtattttttagaatttttataggatttagggggaggtaattgaattaagggggttggttttttttatgttatttttgtgatagtgaataagttttacgagatttgatggttttattaggggtttttgtttttgttgtttttttattttttttttgttgttgtcgtgtaagaaatgttttttattttttgttatgattttgaggtttttttagttaggtggaattataagtttaattaaatttttttttgtttttagttttaggtatgtttttattagtagtatgaaaatggattaatagtattagtagagtggggtattgttgaaaagatattcgaaaatgtggaagtaattttggaattgggtgttgaaataatttggagggtttagaagaagataggaaaatgtaggaaagtttggaattttttagagattgtgaatggtattgataaaaatattgatagtgatatgaataataaggtttaggttgaggtggttttagatggagatgaagatt

SEQ ID NO: 26 - DNA, 5883 bp, Artificial Sequence
  chemically treated genomic DNA (Homo sapiens)
  unsure (4002, 4125..4126, 4206)
ggtttttatttttatttgagattattttagtttggattttattgtttatattattattagtatttttgttaatgttatttatagtttttaggaggttttaaatttttttatatttttttatttttttttgagttttttagattattttaatatttagttttaaagttgtttttatattttcgggtatttttttagtaatgttttattttattggtattattagtttatttttatgttgttgataaagatatatttgagattgggaataaaaagaggtttaattggatttatagttttatttggttggggaggttttagaattatggtaggaggtgaaaggtattttttatacggtagtagtaagagaaaaatgaagaagtagtaaaagtagaaatttttgataaaattattagatttcgtgagatttatttattattataagaatagtatgggaaagattagtttttttgatttaattatttttttttgggttttgtgggaattttggaaggtataatttaagttgagatttgggtggggatatagttaaattatattaatgattttgtattttaattagttgaatggaagtataattttttgttatatgatataataattatttgtaaaatgagtaaatatattataaggaaattatttttataaggtttgaaatttgaaatgtagtttattattatatataattaaaaatagagttttaataaatagatttttagttttgaaaatgtaatatttgtattttatattgttagtttttttaggtatatttataaatatttttataatttatttttaatattttttttttggtttgggtttttatttttttttttatttttttttttttaaggatttagattaaattaattttggttttattttttgtattttttataagtagtagtttttgtttttttttttttttttcgttttttttttttttagtttttgtttgttgtggttcgttttcgtgagagaggtttttaaggaaatagagatataatagatttttgggttcgtgggaggggttaaattagtcggtttcgtttcggaaggaattttaaattttgttttttttattgattagaaaggatagattgattgaggagtttagtagtttatttttttaaagttattcgaagttttttttaggttgtaattttttgtatttttgaagtaatgtatatttaaattttttttttttttttttttttttttttttttttttattttttttttttttattttttttttttttttttcgttatagaaattttttttttttttttgaaaaagttattttagttgtaagtaaaaaaagttattttttattgtaattatgaagttagataataagaaagttgttattttgaaattcgttcgaaaaattgaaagttaagaatagtttttttttttttataaagtttttggttttatgattagtaatttttttttaaggtttattagagtaaagagtaataggtgatttaagcgatgagttttttgtaggagacgttgcgttattggttggaaggttgggtggaattatagaggagttgtttaatgggaatcgttgtttggttatgaattgatgaaagttatttattattttttaattttgattttttatttttgaagtttaatgagtatgaattattatatttagatcgttaagattattttaatgtagatgagagtttgattaaattatttttaaattgtgtaataaaattattttgaaattaaaataagggttaattttttgaaaggaaggtaagtttttaagttttaaggcgatttggtagtttttttttttataaggttgttgtaaattttagtattttaggtttgaaagatattttagatattgagtttaaaagaggttagagatgtggagaggttaagttatttgtttatgtttatatatatggttttttttatttgttattatgttttttagtatttaatatagttttttttatagtatgggtttttaataaatatttgatgaatggttgaaaaaaatgaatgaattgtagtaaagtagaaatgtagatttgtttttttgttttttagtttttgatttttttatattgtttgtttggtatgtaaatttgtatttaaagttagttatattatataaattattaaatttgtgagttcgaaggattgttttgattttatgtagaaattatattttttagcgagtttttagttatattttaataaggataaaggataattttttagtttaggtatttttgttattttgtacggtgttatatggtatatatttaatatattttttatattttaataaatttggagttgtttaataatattttatttttgaaatgttttatagttataggattttgtatgtatgataataattaattatattgaatgaaagatttaatggatgttttttttcgagttagtttagattatatttttaataatgaatattggtttgatatttattttgttatgataaaattggtttttggtgatatgatgggattttttgtaaaaattaataattggtttatgattgtttttgtattattgttttggagagaaatttgaaaagagtatgtttataaaatagtgtgcgaattatagaatggaaattaaaatattaaagttagaaagagaaaagaatgattaaagggaagatttagagtggttgaggggtaggtaggagaaatagataaataagtatttgagtttgttaatgagagatatattttggtgggtgttgtggtaacggttttttattttattatattaggatattaggttttttttttttttttttttttgagataagagttttatttttgttttttaggttggagtgtaatggagttattttagtttattgtatattttgtttttcgggtttaagtgatttttttgtttttgtttttaagtagttgggattataggcgttcgttattttgtttagttaatttgtgtatttttagtagagatggggttttattatgttggttaggttggtttcgaatttttgattttaggtgattcgttcgtttcggttttttaaagtgttgggattataggcgtgagttattatgtttggtttattttattacgtttttatatttttttttttgagatagagttttattttgttatttaggttggagtgtagtggcgtgattttggtttattgtaatttttgttttttaggtttaagtgatttttgtgttttagtttttcgcgtaattgggattatagatgcgtattattaagtttggttaatttttgtatttttagtagagattgggttttattatgttgtttaggttggttttaaatttttggttttaagtgattcgtttgttttggttttttaaagtgttaggattataggtgtgagttatagtgtttagttatagttttttattttaaataaaattaaaatttaaggttattttagttatgttgtattagacgttgtcgataaaaggttattttgataattgttttattttttttatattttattagggagagaaagagttagtaaaaagtaaattgttttagtatttaatttttggtttaattaggagaggtaaaattttattatagtaattagtattttataaatatttgaagtttatttaaattgaatatggagtaatagaaatatagttttaatttttaatttatattatatgagttttttgataatatttaatgttttttatgggtaaataaatagggttttttttttttttgtggggggggggggggttttttttttttttaaattttttataaaaaaaaaatttttttttttttttttaattacgttgtttaggttcgtattttttttagtattatgaaaatattatagttaagtatatattattattaatttatataagaataattataaaagagatgggagtttgtgggattataggcgtttgttattacgttcggttaatntgtatttttagtagagacgggggttttacgtattaagttaggatggttttaattttttaatttcgtgatcggttcgcgttttttagagaggggggggggggggggtttttttttttttttttnntttttttttttttaaaaaaaaaaaaaagagttttggtttttggggaataataggcgtaagttatcgcgatttgtttagtnagttttttttgattgtaagtagtcggattgttttttgtttgtgttgttggttttatgtttgtttgttatttagaatgttaattttgtgatggtaggcgcgaaatatttttttgtttttggttgaatttgtttttattaatatggtatttggtatatgtgagtgtttcgtaaataagtggtagaaaattgttttttttttagtttttaaggtataataatttttgttaaatttggataaatttatatatgtttggattcgtatagttaatgtttggaaaagttttttttgtttattataattattttttattttttttttagtgaattgatggtggggtgagagggagaagagattttttagtttttattttaagttttttgtatagtttttttataatgagtatgtaataaagtattaataaatatttttttaaattgttatattttaaaagattttttgaaattaattttagagtttattttattagtaaaagttttaatgaggtaagtatttagaaatttttttgtttttgttaagtagtgatatttgttttataaagtaagtataaattataaaaaatagattaataaataataaatttttatgaggtagatttagtaatatattgagtttttagtaggatatatagcgattaagttagtagggttttttggtttatgttatttttaattttttaagatattatatgttatcggtttttgaaaaattttttatgatttttagaagtttttttttggtattttagaattttgtttttatttattttttaaaatatgaagtttttttatttatttttttttttttaaaatagaaatgtttttaaaatgttggtttattaaaaaaaaatacgtttattatatagaatttaaataatataagttaaaaatggaagtttttttttaatttaattattttttagagatgtatattttttaataatttattgtttaatatttatagtaaatagatatgtaatagaaaatagtgaatatatatttatataattatatatgtgtatatgtatatatataatttaaatatgatgatattagataaattttttataatattgttttgttttatttaatatattatgtgtttttgttgtaaatgttatgattttatttttttttatggttgagtagtattttatagtgtgtgtatatatatttatgtgtgtgtatatatatatatatatatatgtatatatatatatatttattatattttttttgtttatttgttgattgatgggtatttggattggttttatatttttgtaattgcgaattgtgttgttgtgaatatgtgtgtgtaagtgttttttttatataatgatttatttttttttgggtagatatttagtagtgggattgttggattaaatagtagttttatttttagttttttaaggagtttttatattgttttttatagtggttgtattggtttatatttttattagtagtgtaaaagtgttttttttatattatatttatgttaatatttattattttttgatttttaaattatgattatttttgtaggagagtaaggtagtgttttattgtggttttaatttgtatttttttgataattagtgatgttgagtatttttttatgtttgttggttatttgtatatttttttttaaga

SEQ ID NO: 27 - DNA, 6095 bp, Artificial Sequence
  chemically treated genomic DNA (Homo sapiens)
gttaaaaatttatatttttaagtttgttattatttaagtttaggaattgttttatttgtatattattttaatttttaaaggtttgcgtaaaatttattttgtggttaatatggatttatttaaaaaatttagttgtatttttttttttgggatttttagggtgtagtagttatattaatttttttatttattataatttgaaagttttattaattttaaaggtttagttttataattatatttggttagtttgagattaatttttagaggttatttattttttatgaagattgttttttagttattggtttatttagattttattaataattatttcgtaagagttttttttattattgtttatttatatgtgtagaatttatattgtgaatatgaattaaggatgaatttttttaagagttaaggtttaattggaatgttattttttttttattgtgttagattattttttttttgggaagttgtttcgtgaaataattaaatattgtttttttaaaagagtttgtgatttgttgtatttgtaatttttgaattttatgatttagtttaagattttttagttttttattttatatttttgtttatatttggtttagatttggtttttttttgttcgagaggaataggatttattattattagttagaagttattagtttttaatattttagtaaagaattttagtttgttagagtgagtaatgttttgtttgtatttaagtttttttgaattagttattttaaataggatgttattgtttgtatttatttagaaattgttaagttgtttatgtgtttttttttattagtttatgtgatttttgaaatatttttatgcgttttgatgggagggaaaaaaaataatagttttttatatatttatgtaatgtttatttatggagtatagtgtatatgttagggattgagagttgagtatgtgttggtattttagaaggatatgtttttgtttttaggtagtttagaggttattgagttttattatgaggtaggtatattaggaaatggttttgatgtttttttttattgattatttataataaattatgggaaaggtttgattatttttgttttgtggttgggattatcgaaatttttagaggttaagttattttttgataagggggaaagttaatgtttagatttggattttttcggtttaaggttgttgattgaattttggattttttttaaatagtgtaatttcgtgttaatttaaattaatttaagttttttttttagttttttatattttatggtttggtttagaaagaaagatggtgtaatatataatagatattaagtatttaagagtttgggaagggtttgtgtgattagtggtgtgggtagggtgtttttagaatggaaagtggatgagaggggagtttaaagaggtgatttaggaatttttaaaggtggattttgatttagtaagttattaggtttgttatttgaaatgagttatttgtggtatgggggtaaatgattttagttttttattaaattatcgggaagtaagtaaataaaataattttcgtttttggggagaataattttaattatagtttttagaatttgtatgtttttttatagtttgtaaagtatttttatatttatattttttttggtggaattgtttattgtattaatggagaagggattaggatttgatatggtttagtttgttggtttttatatattttttaagaataattatttgttaaaatgtaattttatgtaatagtttggtatataaaattgatgtaagtggaatttttgtggttgggatggggtttggggagggagaggtatagtttattttttagtttttattttgattattaggtttgtttttgaggggtttttaaggaatttttaggttttatgaaatatagtaagatagatattgtttttagtgattttttacgttattttatttttttgttttaagaaaaggaagttgaaatttttggaggttgtatgaggtgaaaaaagttgttttttgttttgtatttttgtgtatggaatttattagggttggtttttttatatgagtagggattgaagttttatttgggagttagtttgtttttagttgttttaagaaataaagtgtttttttggttatagatagtagtagtaataatttttttttgcggattggtagtattttttaagtatttgttttttaggtggaagttacgggttattgtttttattttagacgggcggttttttgagttatggtatgttagtttttgagtggttgaggattagatttagataaggattttttagttttaaatattttttttgaaaatgtaagaggagtagtttttagttaaatagaatttttataattgaaaaatttatatcggattagatagtggtagtggttgtataatattgttaaagtattatacgttattgttataaatatttttaaatgggtgaaatggtaaattttatgttatgtatattttaatataataatgataataattttaattaagtacgttgtttttttattttttatagggttaagtttaaattttttggtatagtttatattttgtagtttttatatttgtaattttatgtttgttatttttttttagtttttttatttgatttatgtttagattagtttatattgttttttattttttggataagttatgtttttttatttttttatgtttaaatataattttgtttttagtaatgatagtaaatatttatttaaagtgtttattgtatgtatatgtagatataaatttacggtttaatatatgtagggtttttgagttatttaatttttattaattttatgaagtaatagaattgtaatagtaataatagatattattattaagtttattttatatttgagtaaattgagttaattgttttaggtaaggttatataattaagaagtagttataatagggtttggatttaggtgttttagtttttgaatttatgttgttcgttattatattgtattgtttgtggatgatttatttgtttttgtagttttatttgaagaatttttttttttttttttttgaggtttgttttaaatattattttttttgtgaagattgtttggtgttttttaggagagagtgtgatttttttttttaggaatggtagtattttaaatatatatattttgtagtatattttattttgtatggtaatggtttgtttgtgagttttatttcgtattagagggtgagggttttgaagatagcgttaggttttatttatttcgatattttataatatttattatatgtttgatgaatgaatgtatagggggatggttgggtgtattttttttaattttttaattttttgaaataaataataaaattttatttttttttagaagttttggtatggttttttttattttgttatagttattgataattatttttattttttgtgtaatttattaggtaagaagtttatgtagatttatttttagtagtttatatgataaataaatattgcgtttgatttttaaatattaaattatagtatattatagatagatatagagttattatttaaagtatgatattttaattttaaaaggttttttttgaagaatattataaattttttttttttttaagatttgttgggtaggaaagatgggagaaaatgaattaatgtttatatagaaaggaggataatgggggtaaaaataatagatgaacgtatgggtggatgagagaatggataaaatgataggtggatatgttgattttggatagatgggaaatgagtggatatattaataaatagatatgtgggtggatgggtggagaagaggatggtggatggttgtggttttatgaagagatgtgaaaaaggaagtgtggaatgatggatgagaagttgtatgggaagatgaatagaagaataggtggttgaataaattaaaaggtgtgtggttggatgaatgaatgagtgggatgatagatggatttaagtggttagtggatggataggaggatggatggatgtgagagttttagaaggatataaggaaagatgggtggatagatggatgggcggatggaaggatatttaggaggatgaatgagtatgtgtgtggagagaggtgtttatttatattggtttgaatatatgggttagttgagttaaatgttagttttatgataggttattagtagttttttttgagttgttttgttaagaagttaaaatttatttaagttatgtggatttgttattgaggggaaaaagaatgagttttttttttttttatttggaagatttattaattttttattttttattttttattgtgggtacggaggtattgcgttatttagggtaagatttcgttttttttttagttttttttttaggatatttaatattttgtgaaatttagagattttgttttagtcggatttagagaaatttagcgggaaaggagaggttaaaggttgaatttaatggtgtaaggttttacggttcggttattttttgttttgacgtcgcggggttagcgggagaagaaagttagtgcgtttttgggcgtaggggttagtggggttcggaggtataggtatttcgcgatattttaggtttttcgatttacgtttttggtagtttcgattatttatagttttagtagagtacggggcgggggtagaggggttcgttcgggagggttgttattttttaaaatttttgcgggttgtttagttatagttttttttgtttgggtgtgtttttcgttcgtttttttttttcgttttaggttattgtttttaatttcgaataaaaattgtagttaattttcgaggtagttttattgtttagcggattttagtttttgttaggttcggttcgttattttcgtttcgtttttcgtcggtttttgtttcgcgtttagggattttttagtttttttcgttcgcgtttttcgttcgtttcggatattatggataagttttggtggtacgtagtttggggattttgtttcgtgtcgttgagtttggcgtagatcggtgagtgttcgtcgtagtttgggtagtaagatgggtgcggggtgtttagcgcggattcggcggtagttttttcggttgagtcggttttgggggattggagttaagtgagttgtttgcgaagtgtattgggtttcggaaagtagggttgggatttgcgttaaatcgttggagaatgtgtttgtggaagtattatttggttgaaagaaaaagagaaagagaagaaagtttgttgggtaggttgtcggcgcgtagttttgggcgaggtcgttagagttgtagtatatggtagaaagtaatcgttttttcggatgcgtatagtcgttgtttggattaataggtttttgtgtttaagggttcgttaagttttatcgggttgtgtttaggtagggtagagttgggcggggtagagattggggttggaatagggcgagtggttgttattaaggtggttatagaagggattataattttaagtgtgagattagttggtaatgggttttttagaaaggggttttgggtttttttagttttttattgagttttgttttaaagtttatagttcgtagtgttattgttattttagcgttgtggaagtttgaattagttttgcggtgaggttttgggttttttatgagattttagtttgtgatagggagtatgaatatgagaggtaattattggattagttgtttggtttttattattttttgtttttgttaattagtgtggggaaattttaatagtaaggtggtttatattttttgtttggtagttttagagtagagagaagagttttgatattagggtaatattagggattttggagttagggttttaatattttatttaaatagggttagtgttttgtggtggttatggaggggaggggttgcgtgtaaggtatattttagtacggtttaattttaagtattttttttttttgtttatgtatgtatagataattatatggtcgatttgtttatcgttggttaaaattaat

SEQ ID NO: 28 - DNA, 6095 bp, Artificial Sequence
  chemically treated genomic DNA (Homo sapiens)
attaattttggttagcgataagtaaatcggttatgtaattatttgtatatatatagataaagaaagagaatgtttggagttgagtcgtgttagaatatattttatacgtagttttttttttttatagttattataaagtattgattttgtttggatgagatattggagttttagttttagggtttttgatgttgttttggtattaaggtttttttttttgttttgaggttgttaggtagggaatataagttattttattgttgagatttttttatattgattggtagaagtaggaggtggtgaggattaagtagttggtttagtggttgttttttatatttatgttttttattataggttggaattttatgggagatttaagattttatcgtagagttggtttaagtttttatagcgttaaggtggtagtgatattgcggattgtaagttttggaataaggtttagtggggagttgggagaatttaggatttttttttggaaaatttattgttagttagttttatatttggaattgtgattttttttgtgattattttgataatagttattcgttttgttttagttttagtttttgtttcgtttagttttgttttgtttagatatagttcggtggggtttggcgagtttttgggtataggagtttgttagtttagataacgattgtgcgtattcgggagaacggttattttttgttatgtgttgtagttttagcgatttcgtttaaaattgcgcgtcggtagtttgtttaataaattttttttttttttttttttttttttaattaaatggtgtttttatagatatattttttaacggtttagcgtaaattttagttttgtttttcggagtttaatgtatttcgtagatagtttatttgattttagttttttagggtcgatttagtcggaggggttgtcgtcgggttcgcgttgagtatttcgtatttattttgttgtttaggttgcggcgggtatttatcgatttgcgttaggtttagcggtacgaggtagagtttttaggttgcgtgttattaaaatttgtttatggtgttcggagcgaacggagggcgcgggcgaaaggagttggaggatttttgggcgcggggtaggggtcggcggaggacgggacgaggatggcggatcgaatttggtagaggttggggttcgttgggtaatgaggttgtttcggaagttggttgtagtttttattcgaggttgaaaatagtgatttaagacggagggagggagcgagcgaaggatatatttaagtaaggggggttgtgattaagtagttcgtagaggttttaagaagtagtagttttttcgggcgggtttttttgttttcgtttcgtgttttgttgaggttgtaaataatcggggttgttagggacgtgggtcggggaatttggagtgtcgcggggtgtttgtgttttcgagttttattggtttttgcgtttagagacgtattggtttttttttttcgttggtttcgcggcgttaggatagaggatgatcgaatcgtaaaattttgtattattgggtttagtttttggttttttttttttcgttaaatttttttgaattcggttggagtaagatttttgggttttataggatgttggatattttgggagaggagttggagagagggcgaggttttgttttgggtggcgtagtgttttcgtgtttatagtggggagtgaggggtggggagttggtgaattttttaagtggaaagagggagagtttattttttttttttttaataataagtttatatggtttgaatgaattttagttttttggtagaatagtttagggaaagttattgatggtttgttatagggttggtatttggtttagttaatttatgtgtttaagttagtgtgaatgggtatttttttttatatatatgtttatttatttttttaaatatttttttattcgtttatttatttatttatttatttttttttatgtttttttggggtttttatatttatttatttttttgtttatttattaattatttaggtttatttattattttatttatttatttatttaattatatattttttaatttatttaattatttatttttttatttatttttttatataattttttatttattattttatatttttttttttatatttttttataaaattataattatttattatttttttttttatttatttatttatatatttgtttattgatatatttatttattttttatttgtttaagattaatatatttatttattattttatttatttttttatttatttatacgtttatttattatttttgtttttattatttttttttttgtgtaaatattaatttatttttttttattttttttatttagtagattttaaagagaggaagagtttgtaatattttttaggggaagttttttgagattgaaatattatattttgaatgataattttatatttatttataatatattatggtttaatgtttggaaattaaacgtagtatttatttgttatgtgaattattaaaagtaaatttgtatggattttttgtttggtgagttatatagaaaatgaaagtgattattagtggttgtggtaagatgaaaggaattatgttaggatttttgagggaaggtaagattttgttatttattttaagaaattgaaaagttgagagaaatgtatttagttatttttttatgtatttatttattagatatgtaatgagtgttgtggggtatcgaggtaaataagatttggcgttatttttagagtttttattttttggtacggaataaaatttataagtaggttattattatgtaaggtgaaatatgttgtaaaatgtgtgtgtttggggtgttattatttttagagaagggagttatatttttttttggagaatattaggtagtttttataggggaagtgatatttgaggtaggttttaaaggaaaaggaggaggaattttttagatgaaattatagggataagtaagttatttataggtagtatagtgtagtgacgaatagtatggatttaggagttagaatatttagatttaaattttattatggttgttttttagttgtgtgattttgtttaaggtaattagtttaatttgtttaagtataaaatgggtttaataatagtatttattattattattataattttattattttatagaattggtgaggattaaatgatttaaaagttttgtatgtattaagtcgtagatttatgtttatatatgtatgtagtaagtattttaaataagtgtttgttattattattaaaagtaaaattgtgtttgagtatagaaaagtgaaagaatatggtttgtttagagaatagagagtaatgtgagttgatttgaatatagattagatgaaggggttgggggaagatagtagatatgaggttataggtatggggattataaggtgtaagttatgttagggagtttgaatttgattttgtaggaaataaggaggtaacgtatttagttaaaattattattattgttatgttaaaatatgtataatataaaatttattattttatttatttaaaagtgtttatagtagtgacgtgtagtattttaataatattgtgtaattattattattgtttagttcggtataaattttttagttgtggagattttgtttgattaaagattattttttttgtatttttaggaagagtgtttgggattgaaaaatttttgtttggatttagtttttagttatttagaagttggtatgttatgatttaaagagtcgttcgtttggaatgaagatagtgattcgtaatttttatttgaagagtaggtgtttggaaaatgttgttagttcgtaggaaaaagttgttattgttgttgtttgtgattaagaggatattttattttttgaaataattgggggtaaattggtttttagataaggttttagtttttatttatgtgaggaaattagttttggtaggttttatgtataagaatataggataaggagtagttttttttattttatgtaatttttagggattttagttttttttttttggagtaagaaagtgaagtgacgtggggagttattaggaataatgtttgttttattgtgttttatggaatttggaggttttttagagattttttagaagtagatttagtggttagagtaaaagttgaggagtaagttgtgtttttttttttttaggttttattttaattatagaagttttatttgtattagttttatatattagattattgtatgaaattatattttgatagatgattatttttaaaaaatatataaaaattaataaattaggttatattaagttttggttttttttttattagtgtagtaaataattttattaaggaaaatataggtgtgaaagtgttttgtaaattgtagaagggtatgtaaattttaggggttgtaattaggattattttttttagaagcggggattattttgtttgtttgtttttcgatagtttggtgagggattgaggttatttgtttttatattataaatgatttattttaaataatagatttggtgatttattgagttaaggtttatttttgggaatttttggattatttttttgagttttttttttatttattttttattttaaagatattttgtttatattattggttatataaattttttttaaatttttagatgtttgatatttgttgtgtgttgtattatttttttttttaagttaaattatgggatgtgggaaattggaaaggaaatttgaattgatttgagttgatacgagattatattatttgggaagaatttagaatttaattagtagttttggatcgagaaagtttaggtttgagtattggtttttttttttattagaggatgatttaatttttgggagtttcggtaattttagttataaaataagggtaattagattttttttatagtttattatgagtagttagtgaaagaagatattaagattattttttggtgtgtttgttttatggtgggatttaatgatttttaagttatttgagaatagggatatgtttttttggggtgttagtatatatttagtttttagtttttaatatatatattgtgttttataaataagtattatataaatgtatgagggattgttatttttttttttttttattaaagcgtataggggtgttttaggaattatatgaattggtgggaggaaatatatagataatttgatagtttttaaataaatgtaagtagtgatattttatttggggtgattggtttagggagatttgagtgtaaatagagtattatttattttggtagattagggttttttgttgaaatattggggattgatggtttttgattggtagtaataaattttgtttttttcgagtaaagaaaagttaaatttaaattaaatgtgagtaggagtgtgaaatggaaagttgggagattttgggttgaattatggaatttaaggattataaatgtagtaggttatagatttttttaaagggataatatttaattattttacgggatagttttttagaaaaggaatgatttggtatagtaaagaaaaaatgatattttagttaaattttaatttttaaaaaaatttatttttagtttatatttatagtgtgaattttatatatataaatgagtagtggtgaaaaaagtttttgcgaaataattattagtaaagtttaaataaattagtagttgggaagtaatttttatgaaaaataaataatttttaaggattagttttaagttaattaaatgtgattatagagttgagtttttaggattaataaggtttttaaattatggtaaataaagaaattggtgtggttgttgtattttggaagttttaaggggagagatgtaattggattttttagatagatttatgttagttataaaatgggttttacgtagatttttggaggttaaaatagtatgtagataggataatttttagatttggatgataataaatttagaaatgtgaatttttgat

SEQ ID NO: 29 - DNA, 15674 bp, Artificial Sequence
  chemically treated genomic DNA (Homo sapiens)
tttattatatttttaagttatgtttaaaagttaatttatattatttttaatattttcgttttataaatgagaaaataagtgtttagaaagtttaaataatgtgtttaaggttaataggtagtaagtggtttgatttataatttaaatttaggttaaagtgattttgtatattatatattatattgtaagtttttttgattgattcgatatacgtaggtttttattaggtattatgtttgattttggagattgtgatggttaattttaggtattaatttgattggattaagagatgggtgttaaattattatttttgagtgtgtttatgagggtatttttagaggatattggtatgtgagttcgtggattgagttggggagatttttttttaatgtgggtgggtattatttaatcggttgggggtttggatagagtgaaaaggtagaggaaaggtttttttgtttttttttttggagttgagatatttttttcgttttgtttttggttattagaattttaggttttttagtttttgaattttgagatttgtattagtggttttttggttttttaggtttttagttttagagtgagaggtgtattaagggtttttttggttttgaggttttttagtttggataattatgttattggtatttttgtgtttttaggtttatagatggtttatcgaggaacgttttagtttttttaattatatgagttaatttatttatttttttattttattagttttgtttttttagagaattttaatatagatatgtaaatatatttaggataaattttattttttttaagttaatgtgatagaagaggaaattattatgtagaaataaatatttattgatatattttgttagtagtatgaataaagtattatgggagagataattagatttatgaaatgatggagaattatggtaaagaggaaaagtagggttgagaaaggttttttggaggaagtgatatttgattttggttttgaagaatgagttagaattttttgagttgaggagtaaagaagaaaatatgagggagtattatgagaagtagagtaaatagcgtaattgaagtataaaagtttgaaagtagtatagtttaggtatggaataatttagtgttgttagtgttgtttgattatgtaatagatgttagtttgtattttattggttagaagtattaataagtgaagaattttaattataaaaaaaagtatatatttagagatattaagaagaaagagataatattttgaaattataattagttgatgattgataagttaaaattaggaatttaatgatgttaagaatttttaatatgttaggttagttttaaggttagtttaatagttttatttatatatgttggttaggtacggtggtttacgtttgtaattttagtattttgggaggttaaggcgggtggattatgaggttaggagatcgagattattttggttaatacggtgaaattttatttttattaaaaatataaaaaattagtcgtgcgtagtggcgggtatttgtagttttagttattcgggaggttgaggtaggagaatggcgtgaatttgggaggcggagtttgtagtgagtcgagattatgttattgtattttagtttgggcgatagagcgagattttgttttaaaataaataaataaataaaaaataaaagataaaatatatgtttatataatatttttttatgttaggtgttttgttagatattgattgaagatatggtttttgattttgagaggtttatttatttatttagttatttatttatttatttattttatttatttttttaataacgatttgttgagtatatattatgtgttaggtaaaggggttagtagtaaagaagatttatatggtttttttttttattgagtttatagtataggaaatagttattattgaatacgaagatagttatataaatataattttaataaaagatggtaattgatatgtattaaagtaagattaaaatatagagaagtgtatttaatttatattggtattattatgggttttgatttattgtgggattttttgttgttatgtttttttacgttgaaagatgtatttggttttatataaagtatagattatgagtaggtaggtatatatagttttaagttaattttttggggtattaggagatagtattgttttatgtcgttgtatgatatattattatggggtaaaatatttgttgaatgaagttataataaggatataattgtatttatataaatatttaaagatattattatattaatatttattatgtggtaggattttgatgttgtgtggggaggaagataaaagtagatgtatcgttgagatagaaatgagggtaagggaaattttttatgtattgagagaggaagtttgtgaattttttcgttggttatggagttagggagattttagtttaattatcgtttttttttgagtttgtgattaagttttattttttttatttataaaggtgataagagtgatttttttaagtttatttatttgtaaaggggaaattgtagtaattttgttattatagggtaaaaagaaaaaaggatgaaaattagaataagggagagagataagagagagagtagtgttatttataattgtgggtaaagtgtttattatttttttttttttttgtttttttattttaaaaagggagattataatatttattttttttgaggttgttatgaagattaatttaggtgatatagttaatgtgtattttttgtgtttaaaatattttaatatgtattattttttttttttttatttaagaaattttttatatatagataagatgagtttaatatttaaattaaaatgttttgaaaagttaaaaggtaaatttttaaaatgattaaatattgaaaagagtttaaggttattttagagagaggataattaaatttaggtaggttgttttggattgttttttttgggatatgtttgtttttgttttattattaaaatatattttagttagatttttaagagtagtagtggttatttaggtggttttttattttattttttgtataaaaagacgttaagtatatagtttagtagtttttagtgtaaaatagaatattattcgatttttatttttgaaggttggggatagttttttttagttattttttagttttaggggggttggttggtattagggatagttgatagttttatttagttaattagttgttttgtgatatataatgtttttaatgtttaaagtttggtggatgatttttttgtatttatataagtagtagttggaggagaatcgatgagtttttttggttgtttcggggtgttaaggttgttatttaaattattattattataattattaattattgttttagtgagatgtttgttaggtaattgtttttattttttaattattaaaaaagtaattaaattttattagagtaatgtttgttttacgtcgtattaatatatttattaaattttttttgtttgtcgagtttaatggaaagttttggaggagggaatatttaaaatgttttcggatttaaaagaattgataatgttgtggggaagaggtttatataaaaaagtaattataggaagaagttcgatagtatataatatattggtatagagtgttatagatagtgttatttttatacgttggattttatttttgtggtaatgggatgtttgggaggagtcgtattgtgtagaggatttggagaagtggggtattgtggtgggaaattgtttttttttttaggaggtaggaggaaaataattaaggaggtggataggatgtgtattttattagagtagttattagagtttgattttttgataagagagtatattagttaggataacggttaaaagtatttttaaaagatttttgttttaggatgaatgatgtggtttgtgtgatttagcgataaatttaaaagttttgtttttattgtggtttgcggttatatttcgaatttattttttaagtatgttaaatttaagcgtagcgtagagggttgtatatggggtagttataaattaagtttaataattttgttggtggggatgtgttggatacgttgttaatgtttgtttgcgataatgttcgttagtttcggtggtggcggtgtttataggtaataatgtttattatcgtgaatggaatttgtttgattaattttgattagaggatgaaaatattaaagaattaagtgagaaagagggaagagaatcgtatagggaagagtagagcgagtagacgagtcgaacgtagagttcgcgaggggcgagtggaagttttttgcgggtaggtattcgattatcgttttgttttgggcgtggcggtttcgggtttagggatcgtttcggcgttagacggtcgcgttcggaggaaacgggcgttggtgaaagtttaggtgttttggtttacgcgcgtagtcggacgtcgggtttagggagagacgcgggttggggcgggacgggattcggtttttgaagcgcgagggtgggagtgaaagtaaagaggagaaaagtagagagagaggatagtggggtttagcgtcgcgcgaaaggtaggaatcgattcgcggataggaacgggtgtaatgaggttttcggcgagcgtgggaatatagggtttagttttttgcggcgggcgagtacgcggattttaggggcgggcgggtgcgataggacgtgatttggaagcgcggcgcgtgttatcgttttggagtaggtattcggttttcgtggagcgggtaggcgggtttcgggtttggagtttgcgattggggagggcgtcgcgttaatagtagcggttgcggggcggggtcgagtgcgcgtgcgcggttttcgcgggcggggagtaggcgggggagcgggcgggaagtagtgggagcgcgcgtgcgcgcggtcgtgtagtttgggtagtgggttttgtttgtgacgcgcggcggcggtcggttttgtttgtaacggcggcggcggttgttgtttcggatatttgcggcggcggcggcgatttcgcggcgggcgcggagatgtggtttttggtagcggcgttgttgttgggttcggcgtgttgcggtgagtggtttttcgtttttagttttgcggttgttgtcgtttcgttttcgcgggcgtgtgggttgcgttttagttagttcggcggcgttttgaagagggtggtcggggcgtagaatattcgggttttgagcgttcgaagtgtagacgtgggagggttttacggggaatcgggcgttttttttttttttttttttttttttttggtcgtttttttttttttgggtgagagcggggtttattttttttattcggttttttatttttaaatgtatatatataggaagattttaaatcgcgtatttcgcgtaaaaattaattagtaagaaagggcgcgattagaggtaaggggttgtagttgttagggatttttttttttcgtatttttttttttttttagtgtttagacgtatttggggttgagggagggagagtgggagggttcgggttttttgcgatggaagtgcgtattttggcgaagtcggtgagaaggggtttttgtcgtttgttttttatatgaatataggagcgaagaggacgtaaaggatataattaagttttatttttaatttagtatttaattagaagaatttttcggtcgtgtaatttttgttgtcgtttttaattttaaaaataagtttgttggaaattttttttttttcgtgatttttacgttttattagttatttgtatatattttaaattgtacgttgaagttttttttattttatttgggggaatcgttttaaaagtaatttggttttcgtttgaaataggaagatagtaatttttagttaaaatatgtgtagtagaatgggatttggtgtttttcgagtttaaagaatttttatttttttatttttatttcgagtttttggaatttatttcgtttttgtaaaacgtgtgtttcgtttgtaaaaattgagtaaggaatagaaatattcgtagttttatagtgagtgtttgttatattttatatttatagagttttttgtgaatttttataagatttagaatttagtttgagtattagtgatagtaattgttatatttattttagaatgttaaattaattcgattttaaattgattattagtttcggtgtgtcgtttttaaaggtttgtgattttaggtatttttaagatgtttttaagtttttgtttattattttttttttttttcgagtattttggatgttgggattgtgaatttaggttttcgttatttaaatggttgatgttagtgttttttgttattacgtttagtatgtttgttgtttttattattattatagttaaaataatattgtttttagagatgtgttgtataatcgtataataattttagaacgtttttatattgaattagatatgaagtgatatagtattatttatttaaattgtttaaaaagtaaaaagtataaattatatattatttttaaaataggtaggttagatttaaattacgtagtttagaattgttggaatggtattttgagtgataggatttatgttaggttttttttagtaatagttaatattatgtaattagtattcgtttatatataattttaatgtgttcgaatttttagagttatcgaatttagaatttatagtattttattttatttagttaatattaatttaatattaaagtaaaatataggtattatgtagttgagttgtgttaagtgtggattgtaaaataggatagtatttgttataaaatatgtttttgtatgtgtttaatatatagttttaaaaggatatgtatgaagaaagatgttttagtatataggtagttataaattaagggtttgagagattgattttagaatttagaatgagtaagaaagtgatggatttgtatatttatttgtattgaagtttgattttgtttttagtttcgttaattaagtttcgggaattagggattttttttggtattttttatagtgttagtggtttttgtggtaaaagaagttattttagatatttattttatgtaattataggtaaattggaaggtattttaatggtatgtaagatgtgaaatgaattattatgttgtattttattttgtttttatttatgtataattatattttgtttaaaagtgtatagttttagtggtatttattagttagtaaataaaattttaaataaataatgatggtgttgtgaattgtttttttagtggttgaatgatttttttttgtttaaaatgagttgtttttttttttaaattagggtatatatgattaaataaaatttttttttatcgtttaagtttagtagtaatttggtttgtttaaataaaaatgtttttttttaaagaatatattatttttaattataagttgttattttaaggaagtaaatgtttatttaaaagtacgtatttatggggtcgttttagtagtttagaggtagtgttttttaaagtattatattaaatgtttattattaggatatttgtttatgttgttatttgtgttttggtagatgttttatttttgttattgagttgtttatggagatttgaaaggttaagttttaaagatgagagatagatgattttttttttaaattgatatatattttaaatttaaaataattacgtatattcgtaaaattagatttgtattttatagtatgaatttagttatagttagtatataggtattgtttttaatatagtaatgttttttttgtggtataatttttaattattttttttgttttaggtttttgtttatttttttatataagataaatatttttatttttatattttattttttagtttgattttaataatatcgttttgggttattataaagttatttttattttgtatattagtgtagatattttttttgtgataaaaagaataagaataatagtgtaggattagttttgttaaatttattgtagtattaaagtagaaaatatagagtatttaggaaatttgattttgatatatttagattaagataatagaatttgggttttttttttttacgattatatagtgttgaaatagaaattaagttatatttatttttgaatattttattttaaatttatggagtagttgtataagatttagaatttggttaattttatggtttgagatttagattaggagaattaatgtgtatatttgaatatatattatatttgtaggttaaaaggtaaagtaaggggtttggttagtttaaggtttgttaaaattatttttttttattttaagtaagtatgagtttatattatatattaagtagtttgtaaagttttttttggtatatagataaattttagatagtatgttagtatgttttttaatgatttaagatgtagtatatagatagtagggatattttgtttttatttttttatggtatttaggtgtttgttaaggttataattttggatgttattgattttaaattgttttgttttttttaattttaagttggttttttttatttttataaggttatttttaaatttattagggggattgcgttgggttagaattaagtataatttgtggatattttattttattttagatttttattttagtgtttattgaggagagatttgattttattttttttgtacgtaatttagtgtagttagagattttagttttttaagttagatattagttttaaggggtaaaagtaggtaggattgttttttggtatgtgtttttattgatgatttttgtttttttatttaagaggttgttgagattttttattttatttttgaatatttatttttagtagataattaattttttattttattgtaaaaaatagtggtgtgtggtttggattttttttgttttttttttattattattaaattgatttataatattttagataattttcgttttattttttttcgttatttagttttagaagaaaatttatttatttttttaacgaaaggataatttgtttattatttttttatttttattattttggagatttgtttagttagtataattttttagttttgtattttagatttttttttttttattgatttttttttcgtagtttgtatatatgattaaattttattttatattaaaaaataaaataaaaaattttaagaattaaaatgtttttgtttttgtttttgtttgtatattgttagttgttgttttttttgtttttttatattgttaaatttattgtaaaagaattattgttatttaatatattttaagtgtttgataaagttattttgttttttttttattttttaaatatagtgtgtattagattttattagtttattgatagatggaaagatattttttttaaatatttaagttttttttttttataattagtttattatttaattagttatatatattattttggtttataattttaatttttttttttttattttttttgttttttataattaatttttgttgattattgtaagttttaggttttttttttagttgttttttatttggattattgtagtagtttgttaacggatttttttttttttttttttttgttgtttttagttttttttttatattgttgttaatgttttttttttaatgaaattaaatttgagtggtttatagttgtttatgttattaagtttaaatttagtatgatatttaaggaagttttttagaattttttttatttattttttttaattttattttttagagtttatttaaataattttttgtttttagttttttattttttttatttggttgtatacgttattttgtttagaaagtttttttttttttataatatttttatttattttttaagatttagtttaaatattattttttaggaagattatttatagatatatttttgtgatttttaaggaatttttttatttaattatataagtgatttgagattttttatgaaaatatgtagttttatgattttataattaagtttatataagtgagaagtagtggtaggtttttttgaaatatagaagaaaaatttatttttttttatatgatttttagattttttttttatggaatttatattttaaattttttatatttataaggaaggtattgaattttattttttggattttgtgttagatttttaggatattaaatgaagatagtgttttattttttgagtttggagagattagttaagtaaaatagtaattatatagtagtaggtatagtgataatatttgaatataaggtaatgggagtaataaggaggggaagaatataattgagtaatggtagggaaggggaataagattgaataatttaattgtgttttagtaggaagagtaaaagttagtaaattgtagttgttatttattgagtatttgttgtatatgtgaaaggtgatataaaaatatgttattttattaaattttaataatatttttatgaggtatatattattattatgtatattttatagatgaggaaattgaggagtagaggtaagtaatttgtttaaggttatatagttaagaagtatatgaggtgaattttaaattagggtcgattttttaatgtgtgtatttaattattatatattttatgtatttagtggggtaatagtgtataatagttaagaggttatttaggtttgaggaatagtatgtgttaaggtatggggatgagagtgtatttgtatagttatggaattgtaataacgttattatgattggagtttagtgtggaaatgagggagtataggaggtggggttggaaaggattttgaaggatttcgtttgtattttatgttaatgtatttagaatttagtttgaaaagggttgagggtgttgttaaagtattttaggtaaaggagtgtatatttgtatttagaatagttattttgggaattgtagaaaatatattagggttaggatggagaaattttgaggatggaggtagggagttggttagaagggtatggtagtagttcgaggggggaggatgagtgtttaatttatttatttaatagatattggatttaggaattattaattaggttgaatttattaagaattttttatggttaaggagagggagtaatttaatgtgatttttaggtttaggtttggtttattggtagatgatagaaaatattttagtaaagtgatttaggttgagggtaagaagtgggggtacgtaagtttttggatatattgattttgaagtaattgtattatatttaagtggaagtgtatagtagatagttggttgtttaatatttgtagtttagaagaaaggtagtgtatgatttagttttttatttaaaagtttgtaggtgaagaaaattatgggagttagggaaaatattagggggtagagggtattgaatttgaagtttttagggatattaatatttagtgtgagttaaggaatagattttaataaagaaagtaaattaggatggggtggataaagtaggaggaaattcgtaattaggagatattatggaggttaagagagaagagtaagaaagagattgtttattggtttaagaattgtggaaaagttaagatagaaagtgaattatgtatatttgattttttataagggattggtggtgattttggtaagagttgtagtaatgaagaagtaggggtgaatgggtggaggttacgtaatagatttaaggagtgaattggaagtgaggaaatgtttatagattgttaatttgggatgttagggagagagaaagtatgagggattttttttaagttggtaaatatttaagtaatttttaaagatatatataaaaataatattttgtaaatggaatgggggatgtgggaggttgataattaattaaggaaagtcgttgaggagattgatgggtatggaggtagaaatggaaattagtttttaggtgatgggatttattttagaaaaggaagtaaaaaaaaaaaaaaggtgtggatagttggggttataggtaggtttatagggaaggagtattggaagttttaggatttttttttgaaggttttagtttgtattaagaaatagggagagaggattgttggagagtatgggataaagggtagaagggagtaatttaagagttgttaaaaagaagcgaatatttatatgaaatatgtaaaatggtaaagattgaaggttcggaggagtagggattatgatatttttttgtttttgtttattagtaatatgaatttttttagaaatttgtaagattaattatttttttgtttatttataaggacgttgtttatgtagaaaagataatatttgtaattttgtattatatatttattatcgtttatttgagaattgtaagtttttaaaagataataattatatttttttattattatatttttatattttattataatattttattataggtaatttttgataaatgttgattgtatttttaaaatttttaatttgaatttgtgtgttgtgattattatggattgagttttttttgttattataaagtttttttttagattatgatatgagatggtttgggttgatagtttatatttattaatatttgtatagttttaatgaaggttttaagtttaatatttttggtatttgatataaaattatttttttattttatttgttaatttatttataattttggtattatttttggttatatttgtttgttgttatttgatttagattgttataagtatattttgtttatttagagtttttttatttatgttaattatttgtgtttttttatttgttttttatattttaaatagtttttttattttgttgttttatgagaagggagtaggtaaaaggaaaaaattttaaattagatagttttattatttaatagttttttaatgtatttttatagagattgaagttgtagttaatagttagagtgatatttttggtttgtttttatttattaattattagtgtaaaggttatttaaattgtggtttatttaggttaattttattgttatttttattaatagtatttattttatttaaattgttttagttataaaatgtttttattgtaataaataatgtagtataattattgttttttgtatttttttgaaaatttattttttaaatatatgttatgaaatggtggattgtttattaattattttttatttatttaattaaagtttttgtaaaaagttttataggatgattgagttttttattcgtattttttttttttaagaataattttttgaaagttaaattatgatttatataaatataaaatgaatatgtgttaaagattttattttattaattaattaataagtaaattagtaagaaggtaaaatttttttaaaagaaaattggaaaaatagatatatttataggtaattaagaatgtttaaatgaatttgttaataaatgtaaaattggttaatatttttagggtagtaaaatgtagttttttggaatttttttttttattaggtggaaattaattgtagaataagatttatttttatttgtatggatagtaatttatttgaattatttttagttttttataatttatgaaattgtaaaatagtttagttaaagttagtgaaaggtataggtttttatagagttagataattttaaagcgtttgttagatattgtttagtatttgattgaaaggatatttagtagtttttgtattttttttaaaatttttattatattttttgatatttttttttttttataatttgaatatttttatttttttatttttttttggtatattatgtttttttttttttagtgttttttttttaggggaaataatttataattttaaagttttaaagaatgtaacggaagtttaggttttgttttgggttttttagtatttgggtggttagaaatgtagaaaattgggaagaggtgagttgtggatgtttataatataggtttagattgtaattttttagaaatataataatttggattagttaaagagggtttatattattatattaaaatgttagattatttagtttttatagtattattttatatttttatagtatagtattgtttagagagtatttgtcgttatgttttttatgttaatgtttaatatagttttgtgaagtagttcggtgtttgtttttgatttttttatttaagagatttttttattttagagagtaaattaaggtatagaaaagtgagttgtttaaggtagtatattaaaaaggggtagaaatagtatttttatttaggtgttttgaatattgtttagtatttatattttagtatgtatttttgtatttaatttatggggtatttattgagtaaatatagtgtttttataatagaaatattttatgtttttgatttttattttagtttatgtagaagtaaattttaagtgtgaattattaataaagttgatattttatttatatttgttagtaatttgtgttttgtttttgtttatgttttgaggggaaggttaagtagttatttaggtaaaagagttgttgagtggttgaagaatatggaagataattataatttttatatatttttgtatattttagttgaataatgagtgattatatttatttatttagtgttttttttataaggtaataattggtagtttattttattgagaagcgtagataggatgtttattagtagtaattgtttttggttttaatttgtattttatttagtttttttatcgttttgtggttttttggaggaagaatatttataatatatatttggagattgttgttttgtagtgttaatgaaatgtgggggtgggaaaatgttatttaagatttttatataaaatgtttattgttgtttatattttgttatgggaaagtagttatagataatgttttttttttttttattagtattttaagattttttattttagtggaaagatatgatttgatttattttatttattttgtatattaaagtatagtagaatttgttattttttttggaaatgtagtataaggataaagataaattttatattagtttagtaagttttatttagtagtgtgttgaagttgagattgaataaaatatttggtttggttttttgtttaaaattttattttgataaggataatatttttttatatatattagtaggtagtaatgattattttaaagtttttaaagttagatattatatttgtatgttttaatatagttgttgaatttatttttaagatgtatgtaatgtatattttgtattattgagaatgaataaagaaaagttataatgatgttttttagttgtgtaagttaatattaaaatataatttgtttgtatattttatttaataggttttttttattgttatattgtttatttaagtgaataatggaaatgttgttgtttattttaaggatttgtaatatgtttaagattttatagtatagatttttataattaatgaaatattttttttttttttttttagg

SEQ ID NO: 30 - DNA, 15674 bp, Artificial Sequence
  chemically treated genomic DNA (Homo sapiens)
tttggaaaggaaaaagaaaaatgttttattaattatagaagtttgtattgtaagattttaggtatgttataaatttttaagataaatagtaatatttttattgtttatttaagtaaatagtatagtaatgaagaagatttattaggtgaaatatgtaaataaattatattttaatattaatttgtatagttggaaggtattattatgatttttttttatttatttttaataatataaagtatatattatatgtattttgggaataaatttagtaattatgttggaatatgtaggtgtagtatttggttttggaagttttgaagtaattattattgtttattgatatatgtagaaaaatattgtttttattaaggtaaaattttgaatagaaaattaaattaaatattttatttagttttaattttaatatattgttaaatagaatttgttgaattgatatgaaatttatttttatttttatgttgtatttttaaaaaaagtggtaggttttattgtattttaatatataaagtaaataggatgaattaaattatatttttttattaggatggaaaattttaaaatattaatgaggaaaaaaaaaatattatttgtggttatttttttatagtaaaatataggtagtaatagatattttgtatgggagttttgaatgatatttttttatttttatattttattgatattatagaataatagtttttaaatgtatattatgggtattttttttttaagaaattataaaacggtgaaaaagttaagtaagatgtaagttgaaattaagagtagttattgttaataagtattttatttacgttttttaataggataaattattagttgttgttttatagaagaggtattgggtaaataaatgtaattatttattgtttaattaaaatgtataagaatgtgtaggaattgtagttgttttttatattttttagttatttagtaatttttttatttaagtagttatttggttttttttttaaaatataaataaaaataaaatataaattattaataaatataaataaaatattaattttgttaatagtttatatttaagatttatttttatataaattggaataaaaattagaggtatagaatgtttttattgtaagaatattatgtttatttaataaatattttatgaattgaatgtaaggatgtatattggaatataggtattggataatgtttaaaatatttgagtaaaaatattatttttgtttttttttaatatgttgttttaagtaatttatttttttatgttttggtttattttttaaaataggaggattttttaagtaggaggattaaaaataaatatcgggttattttatagaattgtgttgagtattaatatggaaaatatagcggtaagtgttttttaaataatattatgttgtaaaaatgtagggtgatattataaaaattagataatttggtattttaatgtaatgatatgggttttttttgattagtttaaattgttatatttttgggaaattgtagtttgaatttatattgtgggtatttatagtttatttttttttagttttttatatttttagttatttaaatattaggaagtttaaggtaaaatttggattttcgttgtattttttaaaattttggaattgtgaattattttttttgagagagaaatattgagggagagaggatatagtatattagagaagaataaaggggtgaagatgtttaaattataaaggaaggaaagtattagaaaatatggtgaagattttgaaagggatataaagattattgggtatttttttagttaagtgttgggtaatgtttaatagacgttttggaattatttgattttatagaagtttgtgttttttattgattttgattgggttgttttatagttttataagttgtagaaaattgagagtaatttaaatggattgttgtttatatagataaaaataaattttgttttgtaattgatttttatttggtggaagagaggattttaaaagattatattttattgttttgaggatattgattaattttgtatttattagtaaatttatttaggtatttttgattgtttataaatgtgtttgtttttttaatttttttttaaaagggttttgtttttttgttagtttgtttgttaattaattagtgaaataaaatttttgatatatgtttattttatatttgtatgaattatggtttgatttttaagagattatttttaaaaaaaagaggtacgaatgaagaatttagttattttatgaaattttttgtaaaggttttaattaagtaagtaagaagtagttggtgaataatttattattttataatatatgtttagagaatgaatttttaaaggaatatagaaagtaataattatattgtattatttgttataataaaaatattttatagttgaagtaatttaagtagaataaatgttattagtaaaaataatagtaaaattgatttggataaattataatttgaataatttttgtattagtaattaataaataagggtaggttaaaaatattattttagttgttaattataattttaatttttataaagatgtattaaaaaattattaagtagtaaaattgtttgatttggggttttttttttttgtttattttttttttataaaatagtaaagtgaagaaattatttaaaatgtagagagtaaataaagaaatatagataattaatatgaataagaaaattttgaataaataagatatgtttatagtagtttaaattagatagtagtagataaatgtaattaagagtaatgttagagttatagataaattagtaaataaaatgggaaaatgattttatattaaatgttaaaagtattagatttgaaatttttattggaattgtataagtattggtgaatatagattattagtttaaattattttatattatagtttagaaaagagttttgtagtggtagagaagatttaatttatggtggttatagtatataagtttaggttagaaattttaaaaatgtaattaatatttgttaagaattatttgtgatgaaatattgtgataggatgtggggatatagtgatgaaaaaatatagttattattttttaggagtttataatttttaaatgggcgatgataagtatataatataaggttataagtgttattttttttgtatggataacgtttttatggatgggtagaagagtaattggttttatagatttttaagaaaatttatgttgttaataggtaaaaatagaagaatgttatagtttttgttttttcgggtttttaatttttattattttatatattttatgtaaatgttcgtttttttttaataatttttaaattatttttttttgttttttattttatattttttaatagttttttttttttattttttaatataaattgaaatttttagaggagaattttgaagtttttaatattttttttttataaatttatttgtaattttaattatttatattttttttttttttttgtttttttttttgaaatgaattttattatttgaaagttagtttttatttttgtttttatatttattagtttttttaacgattttttttagttgattattagttttttatattttttattttatttataaggtgttgtttttgtgtgtgtttttaaaaattgtttgaatatttgttaatttaaaaaaaattttttatattttttttttttttagtattttaaattaataatttataagtatttttttatttttaatttattttttaaatttgttacgtggtttttatttatttatttttatttttttattattatagtttttgttaaagttattattaattttttgtgaaaaattaaatatgtatggtttattttttgttttgatttttttatagtttttgagttagtgggtagttttttttttgttttttttttttggtttttatggtattttttgattacgaatttttttttgttttgtttattttattttagtttgttttttttgttgaaatttattttttgatttatattaaatgttagtgtttttaagggttttagatttagtattttttgttttttagtattttttttgatttttatggttttttttatttgtaaatttttaaataaaaaattgaattatgtattgttttttttttaaattgtagatgttggatagttaattgtttgttgtgtatttttatttggatgtaatatagttattttaaagttagtatgtttaaaaatttacgtatttttattttttatttttagtttaaattattttgttaaagtattttttattatttattagtgaattagatttggatttaagaattatattagattattttttttttttagttatggagaatttttagtaggtttaatttaattaatagtttttaaatttaatgtttgttgaatgaatgaattagatatttatttttttttttcgaattattgttatatttttttaattagttttttgtttttatttttaaggtttttttattttggttttgatgtattttttatagtttttaaaataattgttttaaatgtaaatgtgtatttttttgtttaagatattttaataatatttttaattttttttaggttaaattttaagtatattagtatggaatataaacgaggttttttaagattttttttagttttattttttgtatttttttatttttatattaagttttaattataatgacgttattgtaattttatgattatgtaaatgtatttttatttttatgttttagtatatattgttttttaaatttaaatagttttttaattgttatatattattattttattgagtatatagggtgtataatagttaagtgtatatattaaggggtcgattttagtttaagatttattttatgtattttttagttgtataattttaggtaagttatttatttttgttttttagtttttttatttataaaatgtgtatagtgatggtatatattttatagagatattgttaagatttaataagataatatgtttttgtattattttttatatatatagtaagtatttaataaatggtagttatagtttgttaatttttgttttttttattaaagtatagttgagttgtttaattttgttttttttttttattattatttaattgtattttttttttttttattgtttttattgttttgtgtttaaatgttgttattgtatttattattgtgtaattattattttatttaattgatttttttaggtttagaaagtaagatattgtttttatttggtattttaagaatttaatatagggtttagaaagtaggatttaatattttttttgtgaatgtaaaaagtttaaagtataaattttatagaagaaaaatttaaaaattatgtgggagaagatagattttttttttgtattttaagagaatttgttattgttttttatttgtatagatttgattatgaaattatgaagttgtatatttttatggaaaattttaagttatttgtatggttggatagaaaagttttttaaaaattataagaatgtgtttatgaatgatttttttagagggtgatgtttaaattgggttttaaaggatgagtaagaatgttatgggaaagaaggggttttttaggtagagtaacgtgtatagttagataaagaaagtgaagaattgaaagtagagaattatttaggtgagttttaggaaatgaggttggaaaagatgaataagaaaaattttaaagggtttttttgaatgttatgttgagtttagatttgataatataaataattgtaaattatttagatttaattttattaaaaaaaaaatattgatagtagtgtaaaggaaggattgagggtagtaagggaaaagagaaagggagattcgttaatagattattgtaatagtttaggtaaagaataattggagagaagatttaaaatttatagtaattaatagaagttagttgtgggaagtaggggagataaagaggggaaaattaaaattgtgaattaaaatagtatgtgtagttagttagatggtaggttaattatagagaaaagaggtttaaatatttggggagaatatttttttatttgttaatggattagtgagatttgatgtatattatgtttgagaaatgagagagaaataagatggttttattaagtatttaaaatatattaagtggtagtgatttttttataataaatttggtagtgtaagaaagtagagaaggtaataattgataatgtgtaggtaggaataagggtaaggatattttggtttttgaggttttttgttttattttttaatatggggtaaaatttgattatgtgtgtaagttacggggaaggagttaatggagagggaaagatttaagatgtaagattgaagaattatgttgattgagtaggtttttaagatggtagaagtgaaaaggtggtagataggttgttttttcgttggaaaagtgagtaggtttttttttgaagttggatgacggaagagaatgagacgaaggttatttaagatgttatagattagtttagtaatggtgggagggaagtagagggagtttaaattatatattattattttttgtagtagagtaggaagttaattatttgttgggaatggatgtttaggaatggagtaagaagttttagtagttttttaggtaaagaagtaaagattattagtaaagatatatgttagaaagtaattttatttatttttgttttttagaattagtgtttggtttgaagaattggagtttttagttatattgggttacgtataaaaaggatgaagttagatttttttttaatggatattaaaataaaggtttggggtagagtggggtgtttataagttgtatttagttttgatttaacgtaatttttttaatgaatttaaaagtggttttataagaatggaagaggttaatttagaattaaaaagggtagggtagtttaaagttaataatatttagaattatggttttaataagtatttaagtattatgagggaataaaaataagatatttttattgtttatatattatattttaagttattaagagatatattgatatattgtttgaaatttgtttatatgttaaagagggttttgtaaattgtttggtgtgtagtataggtttatatttgtttgaaatggaaaaaagtggttttgataggttttgaattagttaaattttttgttttattttttaatttataagtgtgatatatatttaaatatgtatattaatttttttaatttgaattttaaattatgagattgattagattttgagttttatgtaattgttttatggatttggaatgaaatatttagaggtgggtgtagtttgatttttgttttaatattgtataatcgtaaagaggaaaaatttagattttattgttttagtttaggtatattagaattaaattttttgggtgttttgtattttttattttagtattataatgagtttaataaaattgattttatattattatttttgttttttttattatagaagaaatatttatattagtatataaagtgaaagtaattttatgataatttaagacgatattattaaaattagattgagagataagatatgaaaatagaaatgtttattttgtataaaaaggtaggtagaaatttaagatagggaaagtgattgaaaattatgttataaaaagaatattattatattaaaagtaatgtttatatattagttatagttgaatttatattatgaaatgtaaatttagttttgcgaatatgcgtgattattttggatttagaatatgtattaatttggggggaaagttatttattttttatttttagaatttggttttttaaatttttatgaataatttagtgataaagataaaatatttgttaaaatatagatgatagtatgagtaagtgttttaatggtaggtatttagtgtaatgttttaaaaaatattgtttttagattgttggggcggttttataaatacgtatttttaaataggtatttatttttttaaaatggtaatttgtaattaaaaataatatattttttaagagaaaatatttttatttaaataagttaaattattattagatttagacgatggaaaaaaattttatttaattatatgtattttgatttaaaaaaaaaaataatttattttgaataaagaggaattatttaattattgaaaagatagtttataatattattattatttatttaaagttttatttgttagttaataaatattattgaaattatgtatttttaaataaagtataattgtatatgagtgggggtagagtggaatgtaatatagtaatttattttatattttgtatattattaaggtgttttttagtttgtttgtaattgtatgaaatgagtatttgagataattttttttattataaaggttattaatattgtagagggtgttaggaaaggtttttgattttcggggtttaattaacgaaattgaaagtaaaattaaattttaatataaatgaatgtatagatttattatttttttatttattttagattttaaagttagttttttaaatttttggtttataattatttatgtgttgagatatttttttttatatatgtttttttgaagttatatattaaatatatataaaaatatattttataataaatattattttgttttatagtttatatttaatataatttaattgtataatgtttgtattttgttttaatattaggttaatattaattaagtaaaataaaatattataaattttgaattcgatgattttagggattcgaatatattaaaattgtgtgtaaacgagtgttaattatatgatattaattattattaaagaaggtttaatataaattttattatttaaagtattattttaatagttttaaattacgtgatttaaatttaatttatttgttttaaaaatagtatatggtttatattttttattttttaggtagtttgaataaatgatattgtattattttatatttggtttaatatgaaggcgttttgaaattattatgcgattatataatatatttttgaaagtagtattattttagttataatgatagtaaaggtaataagtatattaaacgtgatgataggaaatattaatattaattatttagataacggagatttggatttatagttttaatatttaggatgttcggggagggaggaaagtggtaagtagagatttaagggtattttggaaatatttaaagttataagtttttaggaacggtatatcgaggttaataattagtttaaaatcgaattaatttagtattttagaataaatgtaataattgttgttattggtgtttaagttgaattttgaattttataaaagtttataaaaggttttatggatgtgaagtgtgataggtatttattgtagagttacgaatgtttttattttttgtttagtttttatagacgaagtatacgttttataaaagcgaaatggattttaaaagttcggggtgggggtgggggggtggaggttttttgggttcgaaaaatattaaattttattttgttgtatatgttttgattggaggttattgtttttttattttaggcgaaaattagattatttttaaaacggtttttttaaataaagtgggaaaaattttaacgtataatttagaatgtatgtaagtggttgatggggcgtgagggttacgagaaaggaagagtttttagtaagtttatttttaggattaaaaacgatagtaaaaattatacggtcggaagatttttttgattgaatgttgagttgaaaatgaaatttaattgtgttttttacgtttttttcgtttttatgtttatgtgggaggtaaacggtagaaatttttttttatcgatttcgttaaaatgcgtatttttatcgtaagaggttcgggtttttttatttttttttttttaattttaaatgcgtttaagtattgagaagggagaggggtgcgaaagaaggggatttttagtagttgtagttttttgtttttgatcgcgtttttttttgttagttaatttttgcgcgaggtgcgcggtttggagtttttttgtgtgtgtgtatttggagatggagaatcgggtggaggagatgagtttcgtttttatttagggggaagaagacgattagggaaaggaagggaggaagaaggggggcgttcgatttttcgtggggtttttttacgtttgtatttcgggcgtttagggttcgagtgttttgcgtttcggttattttttttagggcgtcgtcgggttggttggggcgtagtttatacgttcgcgggggcgaagcgatagtagtcgtagggttgggagcgaggagttatttatcgtagtacgtcgagtttagtaatagcgtcgttattaggggttatattttcgcgttcgtcgcggggtcgtcgtcgtcgtcgtaggtgttcggagtagtagtcgtcgtcgtcgttataggtaggatcgatcgtcgtcgcgcgttataggtaggatttattgtttaggttgtacggtcgcgcgtacgcgcgtttttattgtttttcgttcgttttttcgtttgtttttcgttcgcgagagtcgcgtacgcgtattcggtttcgtttcgtaatcgttgttgttgacgcggcgttttttttagtcgtaggttttagattcggggttcgtttgttcgttttacggaggtcggatgtttgttttagggcggtggtacgcgtcgcgtttttaggttacgttttgtcgtattcgttcgtttttggggttcgcgtgttcgttcgtcgtaggaggttgaattttgtgtttttacgttcgtcggggattttattgtattcgtttttgttcgcgggtcggtttttgtttttcgcgcggcgttgggttttattgttttttttttttattttttttttttttgtttttatttttattttcgcgttttaggggtcgggtttcgtttcgttttagttcgcgtttttttttggattcgacgttcggttgcgcgcgtggattaggatatttaggtttttattagcgttcgtttttttcggacgcggtcgtttagcgtcgaagcggtttttgagttcgaggtcgttacgtttagggtagggcggtggtcgggtatttgttcgtagggagtttttattcgtttttcgcgggttttgcgttcggttcgtttattcgttttgtttttttttatgcggttttttttttttttttttatttggttttttagtgtttttattttttgattagggttaattaaataagttttatttacggtggtaaatattgttatttgtgaatatcgttattatcgggattagcgagtattgtcgtaaataggtattagtagcgtatttaatatatttttattagtaaggttattgagtttggtttgtgattgttttatgtgtagttttttgcgttgcgtttgggtttaatatgtttgaaaaatgggttcgaaatgtggtcgtaagttataatagggataaggtttttgaatttatcgttgaattatataggttatattatttattttgaagtaaaagttttttaaagatatttttaatcgttattttaattgatgtatttttttattaaaaagttaggttttggtggttgttttaatggagtgtatattttgtttatttttttgattgttttttttttattttttgggaaagaaagtaattttttattataatattttatttttttaaattttttatatagtgcggttttttttaagtattttattgttatagaaataaaatttagcgtatgaaagtggtattgtttatgatattttgtattagtgtattgtatattatcgagtttttttttgtaattgtttttttgtgtgaattttttttttatagtattattaatttttttaaattcgagagtattttaagtatttttttttttaagattttttattgagttcggtaaatagaaggggtttaataaatgtgttgatgcggcgtgaggtaggtattgttttagtgaaatttgattgtttttttaatgattgaaaaataaaaataattgtttggtagatattttattaaaataatggttaataattatggtggtaatgatttgaatggtagttttgatatttcgaggtaattaaagggatttatcgatttttttttaattgttgtttatgtggatataaaagaattatttattagattttgagtattagggatattgtgtattatagagtagttggttggttaaataaggttgttagttgtttttgatattaattaatttttttaaagttgaagagtgattagaaaggattgtttttaatttttagaggtggagatcgggtgatgttttgttttatattgggagttattgagttatatgtttaacgtttttttgtgtagaaaatggaatgagaggttatttgggtgattattgttgtttttgggaatttagttggggtatgttttggtggtggggtaaaagtaggtatattttaggagagatagtttaaagtagtttgtttaggtttgattattttttttttgagataattttaagttttttttagtatttaattattttaaaggtttgttttttaattttttaaagtattttaatttggatgttgagtttattttatttgtatgtaaggagttttttgggtagagagggaggggataatatatattagaatgttttgaatataggaagtatatattagttatattatttaagttaatttttataataattttagaaaggataaatgttatgatttttttttttgagatgaggaaataaagggaaagaggaatggtgagtattttgtttatagttataagtgatattgtttttttttttgttttttttttttgttttggtttttatttttttttttttttattttataatagtaaagttgttatagttttttttttatagataaataaatttaaaaaaattatttttgttatttttatagataaggaaagtgaggtttggttataagtttagggagggacggtggttggattgaagtttttttgattttatggttagcgaaaaaatttataaatttttttttttaatgtataaaaaattttttttgtttttatttttgttttaacgatatatttatttttatttttttttttatataatattaagattttgttatatagtaggtattgatatgatagtatttttaaatgtttatgtagatataattgtatttttattgtaattttatttagtaaatgttttgttttatggtggtgtgttatgtaacgatatgagatagtgttgttttttggtgttttaaggggttggtttagaattgtatgtgtttatttatttatagtttgtgttttgtgtagggttagatgtattttttaacgtaagggaatataatagtaaaggattttatagtaaattaaggtttatgataatgttagtataagttaagtgtatttttttgtgttttagttttattttggtgtatattagttattattttttattgaaattatgtttatatagttgttttcgtgtttagtaataattgttttttatattgtaagtttaatgaggggagggattatatgagttttttttattgttagtttttttgtttgatatatagtatgtatttaataaatcgttgttaaaagaataaatagaatgagtgaataaatgaatgattgaatgagtaaataaattttttagggttaggaattatatttttaattagtgtttgataaagtatttagtataaaagggtgttgtgtaaatatatgttttattttttattttttgtttgtttgtttgttttgaggtagagtttcgttttgtcgtttaggttggagtgtagtggtatgatttcggtttattgtaagtttcgttttttaggtttacgttatttttttgttttagtttttcgagtagttgggattataggtgttcgttattacgtacggttaattttttgtatttttagtagagatggggttttatcgtgttagttaggatggtttcgattttttgattttatgatttattcgttttggttttttaaagtgttgggattataggcgtgagttatcgtgtttggttaatatatgtgaatgaaattattgaattaattttggagttgatttgatatattagaggtttttagtattattaaatttttaattttgatttattagttattagttggttgtagttttagagtattatttttttttttttagtgtttttgaatatgtgtttttttttgtaattaagattttttatttgttaatatttttggttaatggaatgtaaattaatatttgttgtatggttaggtaatattagtaatattggattattttatgtttggattatgttatttttaggtttttgtgttttaattacgttgtttgttttgttttttataatgtttttttatgtttttttttttgttttttaatttagagaattttagtttattttttaaggttaagattaaatattattttttttaagaagttttttttaattttattttttttttttgttatgattttttattattttataggtttagttattttttttatgatgttttgtttatattgttaataaaatgtgttagtagatatttgtttttatataatagtttttttttttattatattagtttggagaaaatgaaatttgttttgagtatatttgtatgtttgtattagggttttttagagagatagaattaataggatagagagataggtggattggtttatgtgattaaagaggttgagacgtttttcgatagattatttgtaagtttggagatatagggatgttagtagtatggttgtttaaattggagggttttagaattagggaagtttttggtgtattttttattttaaggttgaagatttaagaagttaggaggttattggtgtaagttttagagtttaaaggttggagaatttagagttttgatggttaaggataggacgagaagggtgttttagttttaggagagagagtaagagagttttttttttgtttttttattttatttagatttttagtcggttagatggtgtttatttatattgaaggaggatttttttaatttagtttacgaatttatatgttaatattttttggaaatatttttatagatatatttagaaataatgatttagtatttattttttaatttagttaagttaatatttaaaattaattattataatttttaaagttaaatatagtgtttggtggagatttacgtgtgtcgaattaattaagaaaatttatagtgtggtatgtagtatatagagttattttagtttaggtttgagttataggttaagttatttattatttgttaattttggatatattatttaaattttttgagtatttgtttttttatttgtaaagcgaagatgttaaaaataatataaattaatttttgaatatggtttgagaatgtaataag

SEQ ID NO: 31 - DNA, 6121 bp, Artificial Sequence
  chemically treated genomic DNA (Homo sapiens)
gagatcgattttgtttttatttttgtttttattgtttttggggaaaatttattggaatgattttatttttttttattttttaggtattagtaaagttgtgtttgttgtggtatttaaggttttgtttaatttattaggggtttgttttttatttttagtttaatattatatttttttttgaatatttttgggttatttaaggttttatattttttgagtttttaattttatattggtatgatttttatagtgttttttatgtgttttttattttttgtaggtatattgtagattttttgatgtttagaattttgataattttagagtttgtgtgtatagtagttaggtatgttagttggagtattagatagacgtagatttgaattttgattttggttttaattagtaaaatgtttttgggtaagttatttgatttgtttgaattttagttatttttttcgtaaaataagaatagtgtttataaatatttttatgtgaatgttggaggattattattttgttgttttgttgttgtttttgtttttgaaatttgatttttttgtaaaatgttggaggattaaatgagataatataggtaaaggttttggtaagtatttgatttagtagatatatagaaaataatagtttttgttattattattattttgttaaagttaagtagtaggttaagtgtttattagattagatattgagaagagtgtgtattttaatttatattatgaggattgttgatttgtattttattttttagggtttttgtagttttatttttgggtatgtttaaattttagggatttttgtaattagggttttggtgtaagaatagttgatttatttagggtagggagagggtttttgagtttttattggttattttttttagatttgtttttgaatttatgtagaagtttaattagttagttttgaattttagaatgggtatttatagtattttagtgttcgttgttattatgtaaaaggaggaagattttttggtttaagtttatattttattttttgttttaatattagtttatattttatggttattaatttatatttaagtagattgttgagaattatagagttgtttatttgttaatttaaaagaaagaggttgaaatataaaatatgatttgaagattttatttgagttaaagggaggatagttgtttggaagatttagatttaagtaaaattggttttgagttttgtttagtttttgttataagtaggtttttaaaggtaaaaaaagtgatataaagttttttttttggaatttttattggtttgtagaaataatattaattagtgattggttatatattgttaagttgtaaggtgtgggttatatgtttagtgtagtattattagattaatttatggttatttgtagtaatagtaagtagttttaagaggtgaatatatagtttaaaggtggagtagggggaagtaaaatgtgatttttgttttatttaaatgtttttttgataatttgaaggatttatattttttagataaaagtttttttttttttttaattttttataataatatttaaaggaggtattttaatatttatttttatttttatttttagtagagatggggttttgttatgttgtttaggttgtttttaaatttttgagtttaggtaatttgtttttttcggttttttaaagtgatagcgataggagatagataaatttttggatagatagaaaagggtttttggtgaaattagatttttaagataaagatagtttaaagtttgaaaattgggttgttagttttgggtagagtttataattagagtgagaatttttttgatattttttagttaatcgaatggtgttttttttaggtttgtttatggataaatttgagtcgatgaaaattttagatttagttttatagagggttatttgttttggggttttttttatatagtggtttatttattgtttggttttttttttgttgagagttttttttttgttatttaataaaattattttttgatttatttatttttttttgtttgtatgttttattttttttggttgtaggataagaatttaggatttgttgagttgtaggtggtaggaataagttgtaatatattcgtatttgttgagttgtgggtattgggattaagtgagagttgtgatatatttttatttattgaattgtaggtagtaagattaaataagagttgtgatatgtttttatttgttgagttgtaggtagtgggattgaataagagttgtgaggtgtttttatttgttgagttgtaggtggtaggaataagttgtaatatattcgtatttgttgagttgtgggtattgggattaagtgagagttgtgatatatttttatttattgaattgtaggtagtaagattaaataagagttgtgatatgtttttatttgttgagttgtaggtagtgggattgaataagagttgtgaggtgtttttatttgttgagttgtaggtggtaggaacgagagagagagttgtaatattttttggggttttaggttttgggattttttaagtaaagttgtaatattttttagggtttcgtagttgttggtattttcgagttttttagtgttattgtgttttttttatttagatattggtgtttaaggtggaagtaggttatagtatttttcgttttgttattgattgagtgtggattttatggtttaggagtttaagattggtttgggtaatatggtgagattttatttttataaaaaattttaaaaaaatagttatgtatagtggttattgtattttagattgggtgatagagtgggagtttgtgtttttttttttttaaaaaagagaatgtaatattaatttatagggttttttttaaaaatttaatataatgttatttttttttgttgaaggagtagggtcgtattttaaggttaaattaatttataggaaaaatataatatatagttttaaagtgtaataatttgattaagaggaatttgattttggtgttgttttaaattttatttgtagggttttttttttttatttttatgttttttttttttttatttttagttgatatataataattatatatatttatgggatatagagtaatattttgatatatgtatttaatgtgtgatgattaaattaaagtaattaggatatttattattttaaatattgattatttttttgtgttgggaatattttaaatttttttttttagttttttgaatatatatattaaattatttttaattgtatttattttatagtgttataggatgttggaatttattttttttttttagttgtaattttgtatttattaattaatttttttttattttttatttttttttattttttttagtttttgataattataattttattttttatttttatgagtttattttttaagtttttatatatgattgggaacgtggttttttatttttttgtgtatgatttattttatttaatataatgttttttaggtttgaggattgagaagagtagatattttattgtttatttttatgttgagaattagaaatgtttttaattaaaaagtgattataaatatgttatattaggaattgtggtttgtttgtgggttttgggtgggtaaataattaatttatatttaataggaatgagtttgaaattttttagatatgatatgatttggttgtgtttttttttaaattttattttgaattgtagtttttataatttttatatattatgggagtaatttagtaggaagtaagttaattatacgagtagttattattatgttgttttcgtgatagtgagtttttattagatttgatggttttataaggaaggggttttttttattgttgtttagtgttttttttttttgttatcgtgtgaagaaggacgtattggtttttttttgtattatgattgtaggttttttgaggttttttaagttatgttgaattagaagttaatttaattatttttttggttaggtataggtttatgtttataattttagtattttgggaggttgaggtaggtggattatttgaggttaggagtttaagattagtcgggttaatatggtgaaattttattaaaaatataaaaattagttgggtatggtggtgtttgtttgtaattttagttatgtaggaggttgaggtaggagagttgtttgaatttgttaggtggaggttgtagtgagttgagattgtattgttgtattttagtttgggttatagagtgagattgtattttaaaaaaaaaaaaaattaaaataaataaaataaaataaaattttttttttttttttataaattatttagtttggggtatgtttttattagtagtgtgagaatagattaatatagattataagggtgggaaatttatttttttgggttaagtaattttattttttttttgatgtttagtggataggttgatgttaaattttaaatagtgaattattataaaggaagaagagtagagggtggtgttgggggtaagatatgtagtataaaggttacgtgggtttgattttttagattttaggttttgaatgatatttatttaggtttgattgggaagtttttatgttttagtttttgaattaattagagggatttttgtttgggaacgaaaagtagatattttttattagggttttttatttttttttgagtattggtttttttgagagtatagtagaagttatgaattttttttttataaaaaagtatttatgtatttttaaataaaattgtttttagttttcgtgatgtttttagataaaaaaatttataagattttcggtttttggtttttggggttttatataagtgtgttgggtggagagaaaattttagtggtttttttttttttttttttaattttgtttggtaagtttcgtttttagtttcggtttttttttagttaggtttttaattgttttttgcgttgttgggaagttttggaaggaagtatgtgttttagaggttgggattcgtgtttggttttggaattgttattgttgtttttgttatttttggtgattagtatttaaggtattttttattaattgtgtatttgtgattgtgtattgaaggtatggttagttgggaaaggggagacgggatgtagtttaattttagaagttagatttggtgtttggaaagtaggtatttttattttaatagtatggttatggtatggttggggagttttttttagtattgatgaatggagttttatttttttttttacggggatgtgattaaaataggaatttggggagtaagagaagtaggttttttatattttgtttcgtggttggtggtttatgaagttgtggaaaagtgtttgtttttttattttgaataagaagaagttttatattgatagttgttgtattttatgtttagatatattgtatttttttaggtattttttgagatttttgtatatgtgaggtgttgtattttgagttaaggtaaatgatattgttattgatttaaagaaaagatagattaaaattataggaagaaaagtttggaaaggattgttgtttggggtttttgaatgagggtttgagaagaggttggaagtgttttagtattaaaggaattttaatatatttgattgttaagagttaaggtttatttttttgttatagtttgttcggttttcggtgtgtgattaagggttgagttaatttttttttttttgttagagttgttttattttttttttttatttagtatttttttttttatgttagttgagaaatagtagtgaaatttttgatttttttgttatttttttaagtaaatatttaagtttttttaatttaaagggttttaatgtttattattttgagtaaaatagtaaaaattaataaatatgtggtagttatattgtggtataaaatgatgatagtttgtaatttttggggagatgaggtagaatgtgtggaggatcggttttttatatattttattttttaggtagagttttttggtttatgattgtgtgagtttacggttatataggttttgtgggtttgat

SEQ ID NO: 32 - DNA, 6121 bp, Artificial Sequence
  chemically treated genomic DNA (Homo sapiens)
gttaggtttatagaatttatatagtcgtagatttatatagttatgaattaaaggattttatttgagaggtagaatatgtgagagatcgattttttatatattttattttatttttttaaaagttataaattattattattttatgttatagtgtgattattatatgtttgttgatttttattgttttatttagagtggtgagtattaaagttttttaaattaaaaagatttgagtatttatttgggggaatagtaagaaagttaaaggttttattgttgttttttagttggtataagaagagaggtattggatgaagaaagagggtgaggtagttttaataggagaaggaaagttagtttagtttttggttatatatcggggatcgaataggttgtggtagaggaatggattttaatttttagtaattagatgtgttaaggtttttttgatgttgaagtatttttagtttttttttagatttttatttagagattttagatagtaattttttttaagtttttttttttataattttgatttattttttttttgggttaatgataatattatttattttggtttaggatgtaatattttatatatatagaggttttaaagaatgtttaagggagtatagtgtgtttgagtataaaatgtagtagttgttagtgtagagtttttttttatttaaaatgaaaaaataaatatttttttataattttatggattattaattacgggataaaatatgaggagtttattttttttgttttttaggtttttgttttgattatattttcgtgggaaaggagatgaagttttatttattagtgttaagaaaggttttttaattatgttatggttatgttattggaatggaaatatttgttttttagatattagatttggtttttagggttgaattatatttcgtttttttttttttaattgattatgtttttagtgtataattatagatatatagttggtggaaagtattttgaatgttggttattaggagtgatagaggtagtagtagtaattttagagttagatacgaattttaatttttggagtatatgtttttttttagaattttttagtaacgtaggagatagttgagagtttggttagaaaaaggtcggggttaaaaacggaatttattaaatagggttagagagaaaaaaaaaaaaattattgagattttttttttatttagtatatttgtgtggggttttagaaattagaaatcggaggttttgtaaatttttttatttaagagtattacggaaattgagaataattttgtttgaaggtatatgagtgtttttttgtagggggaagatttatagtttttattgtatttttaggggggttagtatttagaaaagaataagggattttgatagagaatgtttgtttttcgtttttaggtaggaatttttttgattaatttaggggttaagatataggagttttttagttaagtttgggtaggtgttatttagagtttgaagtttgggaaattagatttacgtagtttttgtgttgtatattttatttttagtattattttttgtttttttttttttatgataatttattatttgaagtttgatattagtttatttattgaatattagaaaaaaagtaagattatttggtttaaaagaatggattttttatttttgtagtttgtattagtttgtttttatattgttaataaagatatattttagattgggtaatttataaaggaaagagaggggttttgttttgttttgtttgttttggttttttttttttttgagatgtagttttattttgtagtttagattggagtgtagtagtgtaattttagtttattgtaatttttatttgataggtttaagtaatttttttgttttagttttttatatagttgggattataggtaagtattattatgtttagttaatttttgtatttttagtagggttttattatgttggttcggttggttttgaatttttgattttaagtgatttatttgttttagttttttaaagtgttgggattataggtatgggtttgtgtttggttaggaaagtggttaaattgatttttagtttagtatggtttgggaagttttaggaaatttataattatggtgtaaggggaagttaatacgtttttttttatacggtggtaggaaagagaagtattgagtagtaatggggaaagttttttttttatgaaattattagatttagtgagaatttattattacgagaatagtatgatggtaattgttcgtatgattaatttattttttattgggttgtttttatgatatgtggggattatgggaattataatttaagatgagatttggaagggaatatagttaaattatattatgtttaggaaattttaagtttatttttattgaatgtaaattagttatttgtttatttaggatttataggtaagttatagtttttgatataatatatttgtaattattttttaattggggatatttttgatttttaatatggagatgaataataaaatgtttgttttttttagtttttaaatttgaaggatattatgttaagtgaaataagttatgtatagaaagataaaaaattacgtttttaattatatatggaagtttaaaaaatgagtttatagaagtagagagtaaaattgtggttattagaggttgggaagggtagagggaagtggaggatgggaagaagttggttaatagatataaagttatagttagagaagaggaataagttttagtattttgtagtattatggagtgaatatagttaagaataatttaatgtatatgtttaaaaagttagaagagaggatttggaatgtttttaatataaagaaatgattaatgtttgaggtgataggtattttaattgttttgatttgattattatatattgaatatatgtattaaaatattattttgtattttataaatatgtataattattatatgttaattaaaaataaaagggaaaaaaatataaaagtgaaaagaaagaattttgtaaataaaatttgaaatagtattagaattaaattttttttggttaaattgttatattttggaattgtgtgttatattttttttataaattgatttaattttaggatacgattttgtttttttagtaagaaaagataatattgtattagatttttaaaagagattttgtaaattaatgttatatttttttttttggggggaggggggtataggtttttattttgttatttagtttggagtatagtgattattatgtatggttatttttttaaaattttttgtagagatgaggttttattatgttgtttaggttagttttgaatttttgagttataggatttatatttagttagtggtaggacggggagtgttgtgatttgtttttattttgggtattagtgtttaaatgaagggaatatagtggtattaagaaattcggagatgttagtaattgcggagttttaaggggtgttatagttttgtttggggaattttaaggtttgagattttaagaaatgttatagttttttttttcgtttttgttatttgtagtttagtaaatgagggtattttatagtttttgtttagttttattgtttgtagtttagtaaatgggggtatgttatagtttttatttagttttgttgtttgtagtttagtgaatgggggtgtgttatagtttttatttggttttagtgtttatagtttagtaaatacgggtatgttatagtttgtttttgttatttgtagtttagtaaatgagggtattttatagtttttgtttagttttattgtttgtagtttagtaaatgggggtatgttatagtttttatttagttttgttgtttgtagtttagtgaatgggggtgtgttatagtttttatttggttttagtgtttatagtttagtaaatacgggtatgttatagtttgtttttgttatttgtagtttagtaggttttgggtttttgttttgtaattaagaggaataaagtatgtagataaaggagagtgagtaggttagagaataattttattgagtgatagaaggaaagtttttagtaaagaggggattagatagtgggtagattattgtgtgagaggggttttaaaataggtagttttttgtgaggttgagtttggggtttttatcggtttagatttgtttataggtaggtttggaaaaagtattattcgattagttaaaaggtattaaggaagtttttattttggttgtggattttatttagaattggtagtttagtttttaggttttaaattgtttttgttttgaaagtttagttttattagggatttttttttatttgtttaggaatttgtttgttttttgtcgttattattttgggaggtcgaggagggtagattgtttgagtttaggagtttgagagtagtttgggtaatatggtaaaattttatttttattaaaagtaaaaataaaaataaatgttaaaatattttttttgaatgttgttgtgaaaagttgaagaaaggaaagaatttttatttgaagaatgtgagttttttaaattattagagagatatttaaatgagatagaaattatattttatttttttttattttatttttgggttatgtatttattttttaaaattatttgttattgttgtaagtaattataaattaatttaataatgttgtattggatatataatttatattttatagtttaataatatgtaattaattattaattaatgttatttttgtaaattaatgagaattttaaaaaaaaaattttgtattattttttttgtttttaaaaatttgtttgtaataaaggttgagtagagtttaaaattaattttatttgggtttgagttttttaggtagttgttttttttttggtttaagtaaagtttttaaattatattttgtgttttagttttttttttttagattgataagtaaatagttttataatttttaatagtttgtttagatgtgaattaatagttatgggatataggttgatgttaaaataaaggatgaaatataaatttaagttaaggaatttttttttttttgtatggtaatagcgggtattgaagtattatgggtgtttattttgaggtttaggattagttagttaggtttttgtatagatttaaaaataagtttgagagaagtgattaataaaggtttaaaagttttttttttgttttaagtgaattagttgtttttgtattaaagttttggttgtagaaatttttgaagtttgggtatatttagaggtggggttgtaaagattttagaagatgaagtataggttaataatttttatgatgtgaattaaaatatatattttttttagtatttaatttggtgggtatttgatttattgtttgattttgataaagtgatagtaatgatagaagttattattttttgtgtatttattaagttaagtatttgttaggatttttgtttatattattttatttaattttttaatattttatagaaggattaggttttaaaaataaaaataataataaaataataaaataataattttttaatatttatatgaggatatttataaatattatttttattttacggaagagataattgaggtttagataagttaaatggtttgtttaagggtattttgttaattagaattagaattaaaatttaaatttacgtttgtttgatgttttagttggtatgtttaattattatgtatatagattttggggttattaaggttttgggtattaggggatttgtaatatgtttataagaaatggagaatatataggaaatattatgagagttatgttaatgtgaaattaggaatttagagaatatagggttttgagtagtttaaaaatgtttaaggaggggtatggtattgagttgaggatggaagatagatttttggtaggttaagtagggttttgaatgttataataggtatagttttgttagtgtttggagagtgagagaaagtgaagttattttaataaattttttttagaaataatgagagtaaagataggaatagggtcgatttt

SEQ ID NO: 33 - DNA, 6076 bp, Artificial Sequence
  chemically treated genomic DNA (Homo sapiens)
tttattaaattattaatattattttttataggattagaaaaaaattattttaaaatttatatggagttaaaaataaatagttaagataattttaagtaaaaagaataaagttggaagtattatgttatttgattttgaattatattataaggttattataattaaaatagtatggtattgatatagaaatagatgtatagattaatggaatagaatagagagtttagaaataatgttgtatatttataattatttgatttttaataaagttgataaaaataagtaatatggaaaggattttatatttaataaatggtattgggttaattggttatttatatgtagaagattgaaattggattttttttttatattatatattaaaattaatttaagatggattaaattttaaatttgaaatttaaaattttaaaaattttgggaaataatttaggaaatattattttggataaaggttttggtaaagatttgatgatgaagatgttaaaagtaattgtgataaaaataagaattgataaataaggtttaattaaattaaagagtttttgaatagaaagggaaattattaatagagtaaatagatagtttggagtatgggaggaaatatttgtaaattatgtatttgataaaggtttaatatttaaatttataagaaggttaaattaattaataagtaaaaattaaataattttattaaaaagtgagtaaaggatatgaatagatatttgttaaaggaagttatatatgtagttaataggtatatgaaaaaatatttagtatcgttaattattagaaaaatgtaaattaaaattataatgagatattattttatattagttaaaatgtttattattaaaaagttaaaaaataataggtgttggcgaggttttagagtaaagagaatgtttatacgttgttggtgggaatgtaaattagattagttagtgtggaaaatagtttggaaattttttaaagaatataaaatagaattgttttttgatttagtaattttattattgggtatatatttaaaggaatataaattgttttattataaagatatacgtatgtgtatgtttattatagtattttttataataataaagatacggaattaatttaaatgtttattaatgatagattggataaagaaaatgtggtatatatatattatggaatattatgtagttataagaaagaatgagatgatgttttttgtagtaatatggatgtaggtggagggttttattttaagtaatttaatgtaggaagagaaaattaaatattgtatatttttatttataagtgggaatttaatattgagtatatatggacgtaaagaagggaaaaatagatattagggtttatttgagggtggagcggggaaggagggagaggattaaaaaattatttgttggttattatatttattttttgggtgatgaaataatttgtatattaaaattttgttatatgtaatttatttatataataagtttgtatatgtacgtttgaatttaaaatgaaagttaagaatgatgttttatagtattttttttaaaattttatttttagagtttataagtaaaatttaatgtattattagttaattttaattttttatttgaagtttttaattttataatttttataaaatttatgttttttaaattttaatatttttatatatttaaataattttgaaataaatttggaagttttatttgtatttttatattttaatagtgattattttttaataataaaatagaattatttatttagaaggtttttgaaaaaggtttaaatgggggttaaatataaaatgtttatgtgagtatttgtttatttagaatgtattttggtaaatacgattgtatagtagtagagtatttataatttgtattttcgttattcgtttggttaagtttaagttttttaaatttttagattttattattatttatgatggtgattaatatatttcgtattgagaagattaagttatgagtttgagtttttgttaaatgttttttttaatttagtttttttaaagtttttgagcgtttttttgggttatttaataatatggggttttttgatattgttttattttttatttgtttttgtttttgtttttttaaatgaattttaaatatttgatggttagaaatagaattaatttttaataaaattttataggtatgggtataagtgggtacgttgttttttattaaatttttaaatttaggaaatagttatttttagttgttcggtatttggaataattttttttagtgaaatgatggaaagaggtatatttaaggaaaaatgttttgtattaaaatggttatttattttgttgtgaataatttgttttgagatagttttttcgatatttttaagatttttttttatttattatttttttttttgtagatgtttagtttatttattttttttttttttttattttttttgtttgttttaaatttttggtttttttaatttgtaggttttatattatttgaaattatttaaatatttatagaatattttttatgtgttagatttaatattaggtattaaaaatatagttatgagtaagattatttaatatatatagagtaatatagaatttatagagtttttagtttagtggggaaaataatgaaaaataaggaatgatagagggtggaggaatgtttgtgggtaatgggagtagagagtaggagtaattgtttttgtttggagggttttttggtgttatgatgggggatgagtaaggaattaagtgaataggtgagaggatattttagagagagttcgtgagatagaattagattgatttgtttaagtaattaaaaggaattttatatttagtgttatttagtgtgaggagattttgggggtggggtcggggaagaaatagtcggttgagagttttaagttggggagttatgtgattaaatttgtattttagaaggttttttttttttttttttgaggatagattgaagaaatatttaaggtggttttgaaggatattgggattttgtaatataggtaaaagataaagattaatgtaatttttatggggttggagagaggtggtttggtttgagaaatatttaggtaaaagtataattgataggatttggtggttgataataggtggtggtgtgggagagagagtagtttaagaggatatttggttttttatgaacgtggttgaaaggttagttaggttttttttggatggtggatatggtgggaggagtaggtttgagtgtggggatgttaagttaattaaattgaagttggatattggatttgaggtgtttgggagagagtggagtttaaaggagagattatggtatttatatagatttgtgaatttttggaatagatagatagtaattagagttattagaatgggtgagataattaggaaaatatgagtttagttagaagtttttttttagttttattattttagggatttgtaagtatggtagtagttttgagtgagggttagtgattttagtcgaggtgtagagattttttaatagtattttttaaagtgtagttatattgaaaaattgttttttaagagaaattatatatatatatatatatatatatatatatatattatatagttttatgtttagataagtttggagaaatttatatattattttttttgtttagagaatattaaggattgataagttttgtagtaaagatttttttatttttatttaatttagttttttttataagatagttttggttggagattattttggatttgaatgttttagggtgaaggaagcgggagatagttagtttttttagaggtatgttcgtaagttagtatcgtagagtgtatttatttgtttatttataagatgaaaatattggggtttagtgattgtttttaagttttatagttagttagtgatatatttgggttgttatatatttttttgatttaatttaagaaaattttagtgatgtagtatagtgaaattagaaatatattttttaaaatatattgattatagtgttttttaaaaggttttttttgtgattttgaattttaattttatttttgatatgttttagttgtatgagtttgggtaaattttttaatttttttgagcgtttgtttttttgtatataaataaggatgtaatagtaattagtaggattattattaggtgttattattaataaattgaggttgatagattgagatttgtttaagattttatagttaaaagagataaagttggaattgaaatttagatttttggttttaaatgtggtgttttttgtattaattaaattatttttattagtgtttttgggattatgttttggggatttattttaagatagttttgttttcgagatagagaagtttgtaaatggtgtttaatttaagtttagagattggttgaagttagatagagggagtatgaggagggggtagagaatttttagaaagatattttaaagtttcgggtttagaaaatgtttagaaatattggtttttgtgtttttttttagtttgtttatttgaatgggaaattggtggtggggttaggtatatttttttttgaataaatatatagttaattttgagatgttattttgattgagaagtattgtttttttttaagtaaaaattattgttaaattattttagaatttattattgtttatagatttgtgtttgaattaatttggttttgaagtttttttttgttttataaaattagtttagggtgggttgtgagaggaagtttttaaaaagttattgggaaagtattaaatttttgagattaaagagggcggatttagttttattttttttttttttttatttgggttttttgtcgttatagtatgattatatttttttattttttatttttttttttatataaatagtttcggatatttgtgttattagttttgtttcggttattttaaggataattattaaattttgtcgaaaggattgaggaacggtgtttggaaaaggtaaggttgatgacgttttaatttggtttgttgtttaatgtggggtagggcgtatttttaggggtttttatatatttttttagtaattataaaattttcggtaattttttttttataaatatttagtgtataaagtaaaatagattagtaagattttagtaatatttttaaaggtaattaggttagaaatatttttatttaattaggtttttattatttaaatttttgagtcgaggtatttatatgttttaattgttttagagtttgaattattttgtgtagtaatttttgatgtttggagttttttatgcgagatgatattggggagattttttatgtgttttggtttttagaaaattggttttgtgattttaaagtgaggaaagaatttatagttagagttgtttttagaaagatagttagaagatatagtttttttttatttgagaaaattttaaaagtaaatttagtgatttttattgtggttttttaaagttattaaatagaaaggtggttaaaaattaaaatattaggatgtgtttagtaattgtattttaaaaggtgaaagttagatatttttaaaggatgtatagattgttggtttttaaggagtaggaagtatattgggatttttagtatttttttaaattatttttggtgtataaaatatgattattgataaatgttatatgaaatgtacgtataaaatgtaatttttaaaatttgatattgtagtaatttttaattatgtgttgtaattaatgattgaggttgtatggatttagtaaagtgttagtagagtttcggttttgattttttgtgattattatcggaaattttatgtaagagttttttttttttaagatttgtgagaattttatttgattatgttttggagtagaaaggagaaagttttttttgattatatttatttatttaagtatgaggattgggaatagggtagagggttttagatttttaagaggggtggggacgggga

SEQ ID NO: 34 - DNA, 6076 bp, Artificial Sequence
  chemically treated genomic DNA (Homo sapiens)
ttttcgtttttattttttttggaaatttagagttttttgttttgtttttaatttttatatttagatgggtgggtgtaattaaagagaatttttttttttttgttttagggtataattaagtgaaatttttataggttttggaagaagaaagtttttatatagagttttcgatggtggttatagagagttaggatcgaagttttgttaatattttgttgagtttatgtaattttagttattagttatagtatatgattggaaattattgtagtattaagttttggggattgtattttatacgtgtattttatgtgatatttattagtggttatgttttgtatattaaggataatttggggaaatgttgaggattttaatgtgttttttgttttttaaaagttaataatttatgtattttttagagatgtttagtttttattttttaaaatatagttattgagtatattttggtgttttgatttttagttatttttttatttagtggttttgaagaattatagtgggagttattaaatttatttttgaaatttttttaaatgaaaaagaattgtgttttttagttgtttttttaaagatagttttggttgtgggttttttttttattttaaaattataagattaattttttgaagattagagtatataggaaatttttttaatgttatttcgtatagaaagttttaggtattaggaattattatatagagtaatttaagttttgaagtaattaaggtatgtgaatgtttcgatttagagatttagataatgggaatttgattaagtaaaagtatttttggtttgattgtttttggggatgttattaggattttgttaatttgttttattttgtgtattaaatatttgtgaaagagaagttgtcggagattttatggttattagagaggtatatggagatttttaagaatacgttttattttatattagatagtaagttaagttaaaacgttattaattttattttttttaggtatcgttttttagttttttcggtagaatttagtgattatttttgaggtggtcgagataaggttggtaatatagatattcggggttatttgtgtaaaaggagaagtgaagggtgaaaaaatatgattatgttgtgacgataggaagtttagatgagaagaaggaggaagtgaggttgagttcgttttttttagttttagagatttagtatttttttagtggttttttagaagtttttttttatagtttattttaaattagttttgtgaaataaaagaaaattttaaaattaagttggtttaggtatagatttgtgagtagtggtggattttagggtaatttggtaatgatttttgtttagaaaaggatagtgttttttaattaaggtggtattttagaattaattgtgtatttgtttaaaaagaagtatgtttggttttattattagttttttatttaggtagatagattggaggggaatataggaattaatatttttaaatattttttaggttcgagattttggaatgtttttttgaagattttttgttttttttttatattttttttgtttggttttagttagtttttagatttgaattggatattatttgtagatttttttgtttcgagagtaagattgttttaaggtgagtttttaaggtataattttaggggtattggtagaaatgatttggttagtataggaaatattatatttggagttaaagatttgagttttagttttagttttattttttttagttgtgagattttgagtaagttttaatttgttagttttagtttattaatggtaatatttaataataattttattggttattgttatatttttatttatatataagaaaataggcgtttaaagaggttagaaaatttgtttaagtttatataattaagatatgttagaggtaggattaaaatttaaggttatagagaaggttttttgagaaatattgtgattaatatattttgaaaaatgtgtttttggttttattatgttgtattattggaatttttttagattgggttaaaggagtatgtgataatttaaatgtattattagttaattatgaaatttggaagtaattattgggttttaatgtttttattttataaatgaatagatagatgtattttgcggtgttgatttgcgggtatgtttttgggaaagttagttgtttttcgttttttttattttgagatatttagatttagagtaatttttagttagggttgttttgtggggaaaattgaattaaatgaaggtaaaaaggtttttattgtagaatttgttagtttttaatattttttaagtaggggaaataatatatagatttttttaaatttatttgagtatggaattgtgtggtgtgtgtgtgtgtgtgtgtgtgtgtgtgtgtgtagttttttttggggaataattttttagtgtaattatattttagggaatgttattaaaaagtttttgtatttcggttggaattattgatttttatttagagttgttgttatgtttataggtttttgaagtggtggggttgaggagaggtttttggttgaatttatatttttttaattattttatttattttgatggttttaattattatttgtttgttttaaagatttataaatttatatagatgttatgattttttttttgagttttatttttttttaggtattttaaatttaatatttaattttagtttgattaatttggtatttttatatttaagtttgttttttttattatgtttattatttaggaaaggtttgattggttttttagttacgtttatgagaaattaggtgtttttttaagttatttttttttttatattattatttattattagttattaagttttgttagttatgtttttgtttaaatattttttaaattagattatttttttttaattttatagaaattatattagtttttattttttatttgtgttataggattttagtgttttttaagattattttggatgtttttttagtttgtttttaggaagaagggaggagagttttttaaaatgtaaatttaattatatgattttttagtttaaaatttttagtcggttatttttttttcggttttatttttaagatttttttatattgggtaatattggatatggaattttttttagttgtttaaataaattaatttagttttgttttacgagttttttttagaatatttttttatttgtttatttaattttttatttattttttattatagtattagaaagttttttaggtaggaatagttatttttgttttttgtttttattgtttataggtatttttttattttttgttattttttgttttttattgttttttttattagattgaaagttttgtaggttttgtgttattttgtgtatgttgggtgattttgtttatgattgtatttttagtgtttggtattgggtttggtatataagaggtgttttataaatatttgaatagttttaggtaatgtgaggtttgtaagttaggggaattagaaatttgggataggtagagagagtaaggagaagaaagagataggtagattgaatatttgtagagagagaagtgataaataagggggaattttaggaatatcgggaagattattttaagataaattgtttatagtaaaataggtgattattttaatgtagaatatttttttttgaatgtgtttttttttattattttattgggaagggttgttttaagtgtcggataattagaggtggttgttttttgggtttaggggtttggtagagaataacgtgtttatttatatttatatttataaaattttattgagaattaattttgtttttgattattagatatttagaatttatttggagggataagaataaaaataaatagagaataagataatattaggaaattttatgttattgaataatttaaaagaacgtttaaaaattttgaaaaaattaaattagaaaaggtatttagtagaagtttagatttatggtttggtttttttaatacggggtatattgattattattatagatgataatagaatttgagagtttaggaaatttgaatttggttagacgaatagcgggaatataaattatgagtattttattattgtgtagtcgtatttgttaaaatatattttgaatagataaatatttatatagatattttgtatttagtttttatttaggttttttttaaaagttttttaagtgagtagttttgttttattattggaagataattattgttgaaatatgagaatatagatagaatttttaagtttattttagagttatttaagtatataaggatattagagtttaagaggtatagattttgtgagaattataagattggaaattttaaatgggagattaaagttaattagtagtatattggattttgtttatgggttttaagagtaaagttttgaagaaaatgttgtagaatattatttttaatttttattttaggtttaaacgtatatatgtaggtttattatataggtaaattgtatgtgatagggttttggtgtatagattattttattatttagggggtaagtatagtgattaataggtagttttttaatttttttttttttttttcgttttatttttaagtaggttttagtgtttgttttttttttttttgcgtttatgtgtatttagtgttgagtttttatttataagtgagaatatgtaatatttggttttttttttttgtattaaattgtttaggataaggttttttatttgtatttatgttgttgtaaagaatattattttatttttttttatgattgtatagtattttatggtgtatatgtattatattttttttatttagtttattattgatgggtatttagattgatttcgtgtttttgttattgtaaagagtgttatgatgaatatatatatgcgtgtgtttttatgatagaataatttgtatttttttagatatgtatttagtaatgggattgttgggttaaaaggtagttttgttttatgttttttgagaaatttttaaattgttttttatattggttaatttaatttatatttttattaatagcgtataagtattttttttattttgaaatttcgttaatatttgttattttttggttttttaataataggtattttgattggtgtgagatggtattttattgtggttttgatttgtatttttttaataattagcgatgttgagtatttttttatatgtttgttggttatatgtgtgattttttttgataaatgtttatttatgttttttgtttattttttaatggagttgtttggtttttgtttgttaattagtttaatttttttatagatttggatattagatttttgttagatatatagtttgtagatatttttttttatgttttaggttgtttatttattttgttgatagtttttttttttgtttagaagttttttggtttaattaggttttatttattaatttttgtttttgttataattgtttttggtatttttattattaagtttttattagggtttttgtttagaatggtattttttaggttattttttagggtttttaaagttttaggttttagatttaaaatttaatttattttgagttgattttggtatatggtataaggaaggggtttagttttaattttttgtatatggatagttagttagtttagtattatttattgagtatggagttttttttatattgtttgtttttgttagttttgttgaagattagatggttgtaggtgtgtagtattatttttgggttttttattttgttttattggtttatgtatttgtttttgtattagtattatgttgttttggttatgatagttttgtagtatagtttaaagttaggtaatatgatgtttttagttttgttttttttgtttaggattattttggttatttgtttttagttttatatgaattttaaaatagtttttttttagttttgtgaagaatagtgttggtagtttgatagg

SEQ ID NO: 35 - DNA, 6071 bp, Artificial Sequence
  chemically treated genomic DNA (Homo sapiens)
ttttgtttgtttagttttagtagattgtgattataaggtattgtttgtgggatttttttttttttttttttgattttttttgtggttttaggttgtttggttgtttattgttatggtggttttttattttaacgttttttgagttttatgatggttggtgttattttgtttttttatattgttgggttaggtgttgtttgttttttttagggtattattaattgtaaatatttttttttgttttttttatgaagatgtttttatatttttgtttttttatatttttttggttaagtatgttattttttttattttgggaatttatattttgaattttaagagggggttatagtttggaaaaagttattagggattttggaattaagtttgataaaagattttagtgaagttttgttttgagaacgagtagattgtaggggaggttatgggattttttaggttagtgtttgtgttgattttttaagggtttgtaggtatgtaggtggtttgggttgttcggtagatattttgttgatttttagttgaggggagtatggtggcgattgtttagttattttttgatagatatatagatttgtttttttttttttaagtatatcgtatttttttgtgagatagtgtgtgtaggtattattattttaattttgttgttgtttgatatgttgatttttatttattatgttgtattaatatattagaggtataggagcggtttagttatgaaaaaagaaggttttttgttttatttttttattttagagatgtgggtttttagtgggaatttgttgatttttattttataggttgagttaatgagggaagatgattggcgttttttttgtttaaatgggaggttgttagagcgttggttgggattaggatgtgtaattaagattttagtttgaaattttagattttagtttacggcgataaagaagtaggtgttgtatataaatatgtaaagtaattgtaggaaatttgaaaggaaaaaaagaaatcgaagttagtattttaataattgttttttttgtgtattttgtattgggttgggggatagtattaaaggttgaattttttgagttttttatgaaaaattttaggattttttttttttggttatttttatggaaatgcgatgttagatggatggtaatggtgttttttagtggttgtgagattttattgcgtattgtttattggagttttagttttttgagacggaggaaaattgttgaatattttggatttatttatgtttataatgttgtatttatgaaaaattatattgtgttaggcgtattttaggatatgaatatgattatatttttttttatcgggtgtttttgtagtaagtttttatattttttttaaataatggtttttttgcgttaattattgaggaaaaaaaaagatggggtaagaaaattatttatgtatgatgtagagagttgttgatttgtttttgtttttttaaaggaaaattatttgtaagatgttgtattaaaatattttatatatattttagagatttgtagtaaattatgttgaaaatacggttgtttatatttattgtagttttttatttttttttttttttattaattagttttttttttttgtggaattgtgttgtgggagtttatagttttgtttttggtattggtttgttaggtttaaggtttgtgaattgtagtttttattattatattttataatttttaaatgataaaaatattttttttttaagatattttattgttatttgttgtaatatatagtaaatagatatttttatttcgatgattaaggttatgttatttttagagttgtgtaatatataatatatttagtttttgaaagttaggtttagaatgtagattttataatttgtagcgtttttgttggggggtggggtgggggtagaagtcggatgagaaggagagtaggaatataggatggttttttttagggtttttgcggtaagtttatattatttttttttaattatgaagtgttgttttggttatgaaatgtagcggggattttttagaatggtgataaaagtaggagttgtgtattttagttaagtgagattgtatagcgtattggtttttgtttttttttttagtgttgggaggggtttatatttgtaaattgagaagaatgttagaatgattaaaattatagtagtgatacgtgattagttagaatttatttataattttttaaaatttatagaatatgtaaaaaggaattagatagtaagaagtagagggagatattttttttttttttttttttttaaatttaagatttttaaaagttttcgtgtgtgtttttttttgtttttagaattattggttgtatttttattaattttttgtagttgttggtttggttaggagttgaaaatgtgattgttttttttttgggtatttataatggttttatgttaagttttatgtataattttttttaatttttttttaatgttttttttttgttagggtatgttttaaaaagggaaatagagtattatggaataagattatttttttatgtttttcgtgtaaatttaattagtatttatataaatgaatgtatgtttttttatgaggtatgtaatgaaaatgataatttgtatttatgtaggattgagtagtgttttgtttattatattttgggatttttaagttttgtgggagtagttttaaaggtttggtagaaacgagagttaagatattagagagtggtatgttaggaagaatagtttcggtttttttagttgttttttttttttatttttttatttatgattatttatagtgataagaagataaaattggattttgtaatattagttatagtatgaaaaatatatttatttttttttttgatagtaggtttttagtatgtaaagggaatttttttggttgtttgtttaacgtattgtaggtttagtatttttgagttgtttttgatttataaaattaattaggtatttgagggtttttaaaagtgtttgatggatagtattttttttaatgaaagagtaggtattgttttttggttaaaggagagtttaattaaggaagtttaatgagttattttttatttaatatttggagattatgatttgggggtgaggggtttttttagttttatgtgattgggttgttttttttttagttttgtttttaaggggtttaatagtttttgttggtagtttaaatggttgtatagttgttagtttaaaagttttattattatatttcgtttttgtatgaagggataagagtagaggtattggatatggttttagttggattttaagttttgttttttattgtgtgttttgagtaatttattttttttaggtattagtttttttatttgtaaaaataatagtagtagtaagattaagttaatttaagtaatgtattttatatagggtttgtttaatagatgtttgttgttatattattttttagtttaaaaattttttgtggttttttagtgtttgaaggtttaattttattttgtttttttaagttggtttgagtttttattagtttagggtagagaatatttgatttttttatattttatgttatatattgtttttgttttgtgtttttagtatttatagatggtagggaatatttcgagatagtaggtttgtggtagagggtattggttttagaagttttattgatagagatattttttaagattttatggttaatttaagaaataatttatgtttttttgtaatatggtttaagtgttttgagtgatttcgagtttttatttggggataatggaggtgaagtagtaagaaagtatatttttatttagttttataatttgtattatgtatgtgttggtggttatttgggtagtagggagttttgtttatggaaatggatttttgtttatataataattaagagttttgtgaatttttttagttgggtaggggtaattttggtgtttttgtttgtaagaaaggggatagatagggaggttgatgtgaggagttggttttgggaatagggttatttgttttgggatatagggatgtgaggggagggttagtttaatttagattgatgaagagcggggagagtgatgagtgtttgttttagtttgggttggatggatgtggggaggttgggtagtgagggagatgtggatttgatattttagtttgagggaaagtttcggttgagatgggggaagatagaaaaagaggaatttgagaagggagaaattaaaggttggaaattttagtttcggggataagggagtatggggacgggggaggtttgttttaggtaattttacgtttaatagttgtttaaaatgttttttttttttgttatgtttgaggaaaagtggtttaaagaggtcgtttgatgcgggattatatagcgttgaagggatgaggggtttcgggtgttttcgttcgttttgttgtttttttcggtggttttttgggagttatagtttcgtttagttacggaggggtttatagtacgttttaaacgttaaggggaagcgcgggaggtgcggtaggaaggtagagaaatttggtttttaaaattaagttatttttaaggaaagaattttttattttaaaattttggtttttaaaattaagttatttttaaggaaagaattttttatttaaaaatagcgtatggaatggcggcggaatgacgggagggatcgagttgggggattggacggcgtttcggggatataggaaggaggcgcgtagagtcgaggttagaggcgcgttcggggagtggaagcgcgaagataaacgcggcgtcgcggagggtgggggaggaagggtcggggcgggtcgtcggttgttagtttagggcggggcggagttttatttttggtcgatcgcgtaggcggtgtttgaatttagggttgtttgtggttgggtattcgcgtagaggtcggttcgacgagttatggttgttgggagcgacgcggggcgggttttgggggtttttagcgtggtttgtttgttgtattgttttggtgagtgaagtttgttttaggggtttcgcgtcggtcggcgggtattgggtagtatttaggttgggtggacgcgtcgggttcgaggcggttgtcgattagagacgggtggggacgggtcgttgtgggtcgggaataatttagtcgtgggagtttttttaggaagagaaagttgttattttatcgttagtgttttttatggagttagtaaggaattgtgtggttttagggaaggacgggtttcggttcgttagttttttttgcggggtttgcgttttttcgtcggttttttttcgagttttagtgattaagtttttttttgggtttttttagtaacgtcgttgagcgttttagcggattgtaaaattttttttagtcgtgaacgcgttcgggacggggagcgggcgcggatgttatttgttcgagggcgacgtttgttgtttttttcgcgcggtgtcgttttcgttcgcgcggcgttcgtcgtattagtagagaggattttttagaatcgttttatagcgaggagcgggtaggtaattaggaagtttagtcggtagcggttttacgttgggatttttaagtggtgcgatttttgttttttttttttttttttaaattttaaaaattagtattagaattggttttatttttttcgtgtgttgttagttaagtcgttataataattttaggaaataggtttttttttttttattttgtttttttatttttttttattttttatatattggttttagttaggttatagtaaaatttcgggagtatagtagtaattttttagcgagtttaattgtatttgaggggtttttatggttggtttttgtattttattgttagttttttagttcgttcgttcgtttgtttagcgttcgttgtttgttcgggaggtgcgcgtgtgtatttatggaagatagttaagggggaggggttgagatagatttaaaagtattcgtacgattagataagttagtgttgta

SEQ ID NO: 36 - DNA, 6071 bp, Artificial Sequence
  chemically treated genomic DNA (Homo sapiens)
tataatattgatttatttgatcgtgcgggtatttttgagtttattttaattttttttttttggttgttttttatagatgtatacgcgtatttttcgggtaggtagcggacgttgagtaaacggacggacgggttggagggttggtagtggggtgtaggagttagttatgagaattttttaagtatagttgaattcgttgggaggttattgttgtattttcggggttttgttatggtttgattggggttaatgtgtggagggtgaaggaggatggggaggtaaaatgggaagaaggggatttattttttgaggttgttgtgacgatttggttgataatatacggagaggatggaattagttttgatattagtttttaggatttgaggggaggaaaaaggagtaggagtcgtattatttaggaattttaacgtgaggtcgttgtcgattgggttttttagttgtttattcgtttttcgttgtggggcgattttgaaaagttttttttgttgatacggcggacgtcgcgcgggcggggacggtatcgcgcggggagggtagtaggcgtcgttttcgagtaggtggtattcgcgttcgtttttcgtttcgggcgcgtttacggttgggaaaaattttgtagttcgttgaagcgtttagcgacgttattggggaagtttaggaaggaatttggttattggagttcgggagggggtcggcgggggggcgtaggtttcgtaggagaggttagcgggtcggagttcgtttttttttaaggttatatagttttttgttgattttatgagggatattggcgatgaaataataattttttttttttgaaaaggtttttacggttgagttgttttcggtttatagcgattcgtttttattcgtttttgatcggtaatcgtttcgagttcggcgcgtttatttagtttgggtgttgtttagtattcgtcggtcggcgcggggtttttggggtaggttttatttattaaagtagtgtagtaggtagattacgttgaggatttttagggttcgtttcgcgtcgtttttagtaattatggttcgtcgggtcggtttttgcgcgagtgtttagttataagtagttttaagtttaagtatcgtttacgcggtcggttagaagtagggtttcgtttcgttttgggttggtagtcggcggttcgtttcggtttttttttttttatttttcgcggcgtcgcgtttgttttcgcgtttttatttttcgggcgcgtttttggtttcggttttgcgcgttttttttttgtgttttcggggcgtcgtttagttttttagttcggtttttttcgttatttcgtcgttattttatacgttatttttaagtaagaaattttttttttgaaaatggtttggttttaaaaattaaggttttaaagtaagaaattttttttttgaaaatggtttggttttaaaaattaggtttttttgtttttttatcgtatttttcgcgtttttttttagcgtttggggcgtgttgtaggttttttcgtggttagacggggttgtggtttttagagagttatcggaggaggtagtaggacgggcgggagtattcggggttttttatttttttagcgttgtgtgatttcgtattagacggtttttttgaattatttttttttaaatatgataaggaaagggagtattttagataattgttaggcgtagggttatttgaggtaggtttttttcgtttttatatttttttattttcggagttgggatttttagtttttggtttttttttttttagatttttttttttttgtttttttttattttaatcgggatttttttttaggttgagatgttagatttatattttttttattgtttagtttttttatatttatttagtttaagttgaggtaggtatttattatttttttcgttttttattagtttggattgagttggttttttttttatatttttatattttagaataaatgattttatttttagaattagttttttatattagtttttttgtttgtttttttttttgtagatagaagtattagagttgtttttgtttagttgagggagtttatagaatttttagttattatgtgagtaggaatttatttttatgaataggattttttgttgtttaaataattattaatatatatatggtgtaggttgtgaaattgagtgggaatgtgtttttttgttgttttatttttattatttttaggtggggattcgaagttatttaagatatttgaattatattgtaaagagatatgaattattttttaagttagttataaaattttaaaaggtatttttattagtgaaatttttgggattaatgttttttattataaatttgttatttcgagatattttttattatttgtagatattgggaatataaggtaggggtagtgtgtaatataaaatatgaggaaattaagtgttttttgttttgggttggtaggaatttaggttaatttagaaaggtaggatggggttagatttttagatattggggagttatagaaagtttttgagttgggaagtgatatgatagtaaatatttattgagtaggttttgtgtgaagtgtattgtttggattaatttagttttattgttgttgttgtttttgtaaatgaggaaattgatgtttggggaaggtaaattatttagggtatatagtaaagggtagaatttggagtttagttgaggttatgtttaatgtttttatttttatttttttatataggaacgggatatgataatgggatttttggattgatagttatgtagttatttggattgttagtaagagttgttaagttttttaagagtagggttgaggaaagaatagtttagttatatggggttggggaagttttttatttttaggttatggtttttaggtattgggtgaggaataatttattaggtttttttggttggatttttttttgattaaggagtagtgtttgtttttttattgagagaaatgttgtttattaagtatttttagaagtttttaaatgtttggttaattttatgaattaaaagtagtttaggaatgttggatttgtaatgcgttaagtaggtagttaaaaagattttttttatatattgagaatttgttattaaaaggaggggtggatgtattttttatgttgtgattagtattgtaaggtttagttttatttttttgttattgtagataattatggatgagaaagtaagaaaagagggtagttgaagaggtcggggttgttttttttagtatgttattttttggtgttttgattttcgtttttgttaaatttttggaattatttttataaagtttaggaattttagaatgtagtgagtaaaatattgtttaattttgtataaatgtaaattgttatttttattgtatgttttatgagggaatatatatttatttatataaatattggttggatttgtacgaaggatatagaagggtaattttattttataatattttatttttttttttaaaatatattttggtagaaaaagaatattagaaaaaaattaggaaaaattatatataagatttaatatggaattattatgggtatttaagggagaggtagttatatttttaatttttggttaagttagtagttgtaaggagttgataaggatgtagttaatggttttgggagtagaggaaagtatatacgaaagtttttgaaagttttggatttagaaaaagaagaaaaaaagaagtgtttttttttgttttttattatttagtttttttttgtatattttatgaattttaaagaattatagatgggttttgattaattacgtattattgttatggttttaattattttaatattttttttaatttgtagatgtaaattttttttaatattggaagaggaaatagagattagtgcgttgtgtagttttatttaattagaatgtataatttttgtttttattattattttgggaaattttcgttgtattttatggttagggtagtattttatagttggaaaaggatggtgtggatttgtcgtagaggttttagagaaggttattttgtgtttttgtttttttttttattcggtttttatttttattttattttttaataaaaacgttataggttataagatttatattttgaatttggtttttaggggttaggtgtgttgtgtgttgtatagttttagaggtagtatagttttgattatcggggtggaggtgtttatttattatatgttgtagtagatggtagtgaagtgttttgaggaagaggtgtttttattatttgaaggttatggggtgtaataataaagattgtaatttatagattttgagtttagtaggttaatgttaagggtagaattgtaggtttttatagtatagttttatagaggaagggggttggttagtaaggggaaagaaggatagaagattgtagtaaatgtaaatagtcgtatttttaatataatttattataggtttttgaagtgtatataaaatgttttagtgtaatattttataaatagtttttttttaaaaaaatagaaataaattaatagttttttatattatgtatgggtagtttttttattttatttttttttttttttaataattaacgtagagaaattattgtttgaaaagaatatgaaaatttgttatagaaatattcggtgaaagagggtgtggttatatttatgttttagaatgcgtttagtatagtgtagttttttataaatgtaatattgtagatatagatgaatttagagtatttagtagttttttttcgttttagaagattaaagttttagtagataatgcgtaatgaggttttatagttattggagggtattattattatttatttgatatcgtatttttatagaaatggttaaagaaagaaggttttggggttttttatagaaagtttaaaaagtttaatttttgatgttattttttagtttaatataaaatatatagaaaaagtaattattaaaatattggtttcggtttttttttttttttttaaattttttataattgttttatatatttgtgtgtagtatttatttttttatcgtcgtgaattgaaatttaagattttaaattgaaattttagttatatattttagttttagttagcgttttggtaattttttatttagatagaggaaacgttagttatttttttttattgatttagtttataaagtaggagttagtaaatttttattgaaagtttatatttttgaaataaagaaatggggtaaaagattttttttttttatgattgagtcgtttttgtatttttaatgtgttgatgtagtataataaatgagaattagtatgttaggtaatagtaggattaaggtggtggtgtttgtatatattgttttataggagggtacggtatatttgggggagaaaaggtaggtttgtgtgtttgttagaaaatggttgagtaatcgttattatgttttttttagttgggaattagtaaagtatttgtcgagtagtttaggttatttgtatatttgtagatttttgaaggattagtatagatattggtttggggaattttatggttttttttgtagtttgttcgtttttagaatagggttttattggaattttttattagatttagttttagaatttttgatgattttttttaaattgtgatttttttttgggatttaggatgtaagtttttagagtaaaggagatggtatgtttggttagaaaaatatgggaaagtaagggtataagaatatttttataaagggagtaaaaggaaatatttgtaattgatgatgttttaagaaggataagtagtatttggtttaatagtgtaaaagaatagggtgatattagttattatggggtttaaggggcgttaaaataaaaagttattataataatgaataattaaataatttagaattataagagagattaagaaagggaaaggaaaaattttatagataatgttttgtgattatagtttgttgagattaggtaaatagaa

SEQ ID NO: 37 - DNA, 9997 bp, Artificial Sequence
  chemically treated genomic DNA (Homo sapiens)
gaattttgttgaaggcgttttttgtgtttattgagataattatgtggtttttgtcgttggttttgtttatgtgatggattatgtttattgatttgtatatgttgaattagttttgtattttagggatgaagtcgatttgattgtggtgaatgagttttttgatgtgttgttggatttagtttgttagtattttattgaggatttttatatagatgtttattagggatattggtttaaaattttgttgttgttgtgtttttgttaggtttcggtgttaagatgatgttggttttataaaatgagttagggaggattttttttttttttattgattggaatagttttagaaggaatggtattagtttttttttgtatttttggtagaatttagttattaatttatttggttttggattttttttggttggtaggttattaattattgttttaattttagaatttgttattggtttgtttagagattcgatttttttttggtttagttttgggagggtgtatgtgtttaggaatttatttattttttttagattttttagtttatttgcgtagaagtgtttatagtattttttgatggtagtttgtatttttgtgggattggtagtgatattttttttattattttttattgcgtttatttgatttttttttttttttttttttattagtttggttaatagtttattttgttgatttttttaaaaaattagtttttggatttattgattttttgaagggttttttgtatttttattttttttatatttgttttgattttagttattttttgtcgtttgttagtttttgaatttgtttgtttttgtttttttagtttttttaattgtgatgttagggtgttaattttagattttttttgtttttttttgtgggtatttagtgttataaatttttttttatatattgttttaaatgtgttttagagattttggtacgtcgtgtttttgtttttattggttttaaagaatatttttatgtttgtttttatttcgttatttatttagtaatttaggagtaggttgtttagtttttatgtagttgtgcggttttgagtgggttttttaattttgagttttaatttgattgtattgtgttttgagagatagtttgttgtgatttttgtttttttatatttgttgaggagtgttttatttttaattatgtggttaattttagaataattattatgcggtgttaagaagaatgtatattttgttgatttgggatggagagttttgtagatgtttgttaggtttatttggtttagagttgagtttaagttttggatatttttgttaattttttgttttttgatttgtttaatattgatagtggggtgttaaagttttttattattattgtgtggaaatttaagtttttttgtaggtttttaagaatttgttttatgcgtttaggtgtttttgtgttgggtgtatatatatttaggatagttagttttttttgttgtattgatttttttattattatgtaatgtttttttttattttttttgatttttgttggtttaaagttttttattagagattaggattgtaatttttgttttttttgttttttatttgtttggtagattttaatttattgtgagtagttttttacgtttattattttttttggttatgcggttttttattatggaagtgtattatagtatatttatttttttattgttggatgtgtgtattattaaatttttgttattttaaagaatgtttgtatgtttttgattattttttatttttgtgatgaaaggtttatttggagtttttattacggaaatgattttagagttaatttacgtattatttaggaaagtttgtcgtttttttattatgggggaagatttgtttttatatattttttttgagggattttttagttgtgtattttttagaatgattaaaaattatttagaataatagtagtattattagaatagtcgttagggataaatttatcgttattaatgaattttgaaatgtttggaaaggagttgagtgttgatgttttttgagtgtattttgtatttaagtatttggtttgggtggaatggtaatatttttggtttatttattattttatttatatttaatttatgggtatttttttttttttttttttttttttttaaaatggagggtgttttagtttagggagtagttttattaaaagatagatgatttatgattattagaaaaggaatattgttatgtgtgaatttttttgatgtttttgattgtaaaagtaatatttggttaattatagaatatttggggaaaggatggtaaaaagtaaaggattaggaagaaaaataaaaagttataaatgattttgtttagtgttagttattatttatattgtagggtatttataaaatagttttaaaataattagttgtttttttttttgtttttcgttttttttcgttttttatatatatatatatattttatatgaacgttttgtttttggaaatttatattttggtagtggtttataaaggtttggttttattttgatggaatagttcgattttggtatttatatatagttattttttttttttgttgttttggttttttttgtagtatgttatgggattagttatagtaataattagttagttatgtggaattgaggttaagatttgatattttttaattattttagaaaattgagggtttttttaggtttgatgtttgaggttttttttgtttatttaatttagggtgtttttttggtttttttattttatattattttttgtttgtttttttatcgtttattttttaatattttttttttatataattttttttttaagtaattttattatttttgagtagtattaatagtggttatagttttttgagtgttatttttggttaggtattgtgttatgtagtatatgtaattatttttatgtttattagttaaagcgtgattagaggttaatatatagtaaagaggtgatagagttagaattatttggttttgtttagaggtttttagattggattggaatgtttgtgttttgaatttttttattgtgttttttttgtttttttagtaggttatttttttttaaggtattttaaagaatagttttttattaggggttttgtgtgttgtggtagtgtgatttatgttaaggattattttaagggaagtgttttgaatcggtagtttttgttagtttgatatttttttagtgtttaattcgagttaggagattttttttttttttttttcgtggggatgtttgatattgtagttatattgggtttttgtttgtttgtttggagagaggattttgttgtgttatttaggttggagtgtagtggtatagttatagtttattgtagtttttattttttgggtttaagcgatttttttattttagttttttaagtagttgggattatagttatgtgttattatattagtttaatttttttttaatgtttttatttttgtagagatagggttttattataatatttaggtttcgattatgttatgtttaatttttaggaagtgtttggagttttttgttcggggattttagattaatatttttttttttttgtttatttgtagtagttttttgtatattggagttttgtttaatttgagtttataaattattttttttatttagaaatttttgaaaatggggaattaagtaagtcgttggtatgtgttggagtttaggttttttgggaaggtttatatgggggatggtgtttcgtagtaggttgtaggttttagagtttagcgggtggtggggagtttttaatttgtaaggaaaggttagatgataattgtttttttttttggttttttatatattataaaattattttttttttatttttattatttttatttttaggtttgatttattgattgtttttttttttggataatgttagattttgttttttttttggaattttttagttttttattggtttgcgttagtaaatttttaagtagtagatgatttttaagatgtgtgagaaggaagggataggaatgattgttaggattgttagttttttagggaattttgtatttttgatttagggagggtagatgatttatttttttaagaatttatttgtttgttcgggtttgtggggttttggagaatagaatatggagtattttggtttataggtattgttatttttttattttaggatgggtttagggatgtaggattggagttgggagattttttagttttgttatggatgttttgtatttaggtaagtttaaaatttttttaagttttggtttttttattgggtaaagtagggttggaggtattttaggttttttttttttttatttgatgttattattatatatttaggtatttacgtaatggaaatttataaagttgtttaatatttttttttatgtttttaaagagagtaagtaagtgtttttattatattttttatagtgaggagttagagtttttaggtatgttaagttattgttttttgttttattgttgaatgtatgttggtgttttttagagttatttttttggtttgatttatttagtgttgtggtttcgagaagtggtttttttttttagttagtagtttggggtggggttagtagagtgggaattatagtggttatatgagttaatttgtttatattgttatttgatttattgattttgatggggaagatagtgttatttttatagtgtggtagtatatattggggtttatagggattgagtttatttaagggtatatggtgttgtgggttagagttggggtatggtttagggatttagtgtgttttgattttttttgtaaatgttttttttagaagtttttttggttttttagtttttggtttttgagataattagtagttatttgttcgtttttgatatttttttttgttttttttttttaggttttgtggataattataatgggaatttaaggagggtttgttttgttcgggttgttgttcgttttggttgttttttgttatttaggtgagtgttttagttttaggatatggatttaggttgttttggttatgaattttttttttaagttttagttttagttttagttgtttttttaggtttggttttggtttttttgttttttagtgttataggtttggggttgtatgatagtttttttttatgttatgattttgtttttagtggggtatcgttttgagttatagttcgttttgagttatagcgtggtttttggtaggggtgggttaataatcggcggttgaagttttatttttgttattataagttgtttggggatattaatggatattatttttagagtgttgtgtaagtttttttggggtttattttgtttagagttatttgagtttagtttttttgttttgaggttttttttgtgttttaatgatgatgatggttatagtgatagtagtagtagttaattaattttgaagtatttatgtgttagttattattttaagtattttacgtgtatttgtttatttaatttttatgttaatttgatggagttggtggtatttttatttttgttttataagtaataagattgaggtttttttaaaattaataatttgttaaataatatatagaagtggtatacgggaatgtgaatatatagtttggtaatagagtttttgttttttttttttgttttaggttatttgttattgggttattttttttttttagttattttttttttggttgttggaggaaattgtgtgtttttgagttaatttttataatagtggaaatatatatgttttattgtaaagattaagtgtggttgtttgtttgtgttatgttggtataatattttggttattgttggttttttgttttttataaatatggttggtggggggagtagaaaagaaagtggtaatatagtgagtaatttaaaaaaagatttttatattattgtagtatgttttagaatattaatagtaattatatatttattgtttattgtttattggggattgtgttagagtttgttttatttaaattcgtttagttatttcgggaggtcggtattgttattttttatattatagttgaggaaatgaaggtaaagtagtaatttggcgttaggatatattttaatatgttttttttttttgagtagaaagagaagttatggtatttttttttttttatttttcgtgattttagttagggtgtattgtaatgtggtttatttgtgttaaaatattatattttttttataattattttttatttatttattttttttggttttttttttttttttgtttttgttgtttaagttggaatattttttagaattttaatagtttagtgatattttatttttagtagtttgtatttgtttatggagtaagtttgggattattagtttttttgtgataagttttggggtgtattttagtttttttttagagaattgagatgtgaagtttatatgtttatagatgagaggttttttttgttgttgtttaaaagggttttaggattttgtaggggaatttttttttgagttttgttttttatggtttaggggaaatttcgtttattttggtttagtggttaaaatattaaattattgtttattgatttattgtttgtttttttttgtttgttttttttagggggatggagttttattttgtcgtttaggttggagcgtagtggcgcgatttcggtttattgtaattttcgtgttttaggttttagcgatttttttgttttagttttttgagtagttgggattataggagtatgttattatgtttggttaatttttgtatttttttttatttattttttaatttttgtatttttagtagaggcgggtttttattatgttggttaggttggtttggaatttttgattttaaatgatttatttattttagtttgttaaagtgttgggattataggcgtgagttattgtatttggttttgttgtttgtttttgattttagtttttattataatttagagtttttttttttttttatttaggttaattagaagaatattatggttaattaagtttggattttagaattgatagtttgagtttgagtttagttcggttatttagtagttgtgtggttttgaataatttagttaatattttagttttagtttttttttgtaaggtggggatgaagataattgagtttagtttttttaataattttatgaagagtttagtatatagatgtatatatatttgaatattgaatgaatatgtttgttatgaatatttttgtttatagacgttttaattatgggttttagtttttttttttaaagtttttttaagaggttaaatgagttcgggatttagttattataaaaatttatgtttataggtaattttttaaaatggtttttaaatatggttagttttaagaataatattttttattttagattttttttattttatgcgtgtgaatatatgtttggtataaggaagggattaaagaaaaattgtatttttgcgttttttttttgtggttttttttttatacgggtatgatagttataggttgatagtgggggagaataaataaagtttggtggatggggttttgtttataggttttagggttgtcgttagttttgttgttttgtagttaggtgtttttgtgtgagttatattatttttttagatatttgttttgttatttgtaaaaaagttggggaggaggttggtttttattttattttattttatttattttttagatatggtttcgttttgttttttaggttggagtgtagtggtgtaagtttggtttattgtattttttattttttaagtttaaatgatttttatgttttagttttttgaatagttgggattataggtatgtattattatgttcggttaatttttgtatattttgtagaggcgaggttttattatgttggttagggtggttttaaatttttggttataagtgatttatttatttcggttttttaaagtgttgggattgtaggtgtgagtcgttatatttggtttagtttgttgttgttttttaaaattaatattttaaggtattaatttgtaatttttataagttagaggattttttattgggtaggattttatatttgtgagggtagatatggttattttagatgttttagagaattgggtttttgtgtgtgtttagaaagtgaggatttattttgtttttattggattttttattgaaaaatttatttttatggtgataaatttagtttttagttttagaattagaagttagttgttgggttttaaaatttatatttggtttaattatgatatttttttgtgagattttacgtgttttatttttgaaaatgtttttttatagaggtaggtatttttaaatattgattatatggtagaagttatatggtatgaagatagtttatttttgatgatggaaaagggggtatttatataaattaggaagatttttttttaatttttgtttttttagtttttttttattatacgtgtggattgtaatttatttttttgttgttattgttgttataaaaatggagaaggaaaaataatttagtaaaaattgatagttagtaaggatgagttttaagaattgattgggagtaataattgttttttaaattagggaattggaggtaatttgtttttgatgtaagatgatttttacgttgtgtttgttggtatttagttgttttatgtttatgggtttaaagtgtatagttgttgttttgtttttgatagtgtgtatttttggtattcggttagttttttagaagggagtagtttagtaatgatattttgttttagaggttattaaattttttttgtataggattagatagtaatttttttttttttttaaatagagttttgttttgttatttaagttggagtgtagtggtgtaattgtggtttattgtaatttttgttttttgggtttaagcgatttttttgttttagttttttaagtagttgggattataggtgtgtattattatgtttggttaatttttttatttttagtagagatggggtttcgttatgttggttaggttggtgttaaatttttgattttaggtgatttatttttttcggtttttttaagtgttgggattataggcgtgagttattgcgtttggtttagatagtaaatattttaagttttgtagattaagaggtaaaattaagggtattatgagatttattttaataataagaaataaaatttttatagatttttttattgataaaatttataatataattattgagtttagtataataatatatatttattaatgaggggaatagaattttttttagggggataattatttgtttaattggggtttaaaattagtgttttttcgtattaaattaattgtagatgtttatttattaatattaatttgtgatgatattttatatattttattttgaaaatgtatttttacgtagataggtattgttagatattgattattaatttacgaggatgtgatttaattgggtatatttattgtttggaagatatttatagaattttgtttgtttttcggtaatttttttttaatatattattatattgtagattaatttttttttagttgtaggttaggaggaagttttttaattgtatagttagatggatatttaaatgtggatattttttttgtgtttgtattagggtttaaaaaatgttgttggaattgtagtttgaatttggaaagatataattgttatatatttgtgcgggagtggaagtatattataagttgttgattttgggtttatattaatggagatggtgggttgttaggggataagttagtgttgttttaagagattttgattttttttttgattttagg

SEQ ID NO: 38 - DNA, 9997 bp, Artificial Sequence
  chemically treated genomic DNA (Homo sapiens)
tttagaattaggaagaaagttaggattttttaaagtagtattgatttgttttttggtagtttattatttttattaatatgggtttaaagttagtaatttgtggtatatttttattttcgtataaatgtatagtagttatatttttttaaatttaaattatagttttagtaatattttttggattttgatgtaagtataaaggaaatatttatatttgaatatttatttaattgtgtaattgagaagtttttttttaatttgtaattggaaggagattagtttgtaatgtaatgatgtgttaagaagaaattatcgagaaataaatagaattttataagtgttttttaagtaatgaatatgtttaattaaattatattttcgtgggttgatgattaatgtttggtaatatttatttgcgtgaaaatatatttttaaaatgaaatatgtaaaatgttattatagattagtattaatagatgaatatttgtaattgatttgatgcgagggaatattaattttgaattttaattaagtaaatggttatttttttaaaaagaattttattttttttattagtagatgtgtattattatgttggatttaataattatgttatgaattttgttaataaaaaaatttgtgaaaattttgttttttattattgaggtaagttttataatatttttgattttgttttttggtttgtaaagtttaaaatatttattatttgggttaggcgtagtggtttacgtttgtaattttagtatttagggaagtcgaggagggtggattatttgaggttaggagtttgatattagtttggttaatatagcgaaattttatttttattaaaaataaaaaaattagttaggtatggtggtgtatatttataattttagttatttgggaggttgaggtaggagaatcgtttgaatttaggaggtagaggttgtagtgagttataattgtattattgtattttagtttgggtgatagagtaaaattttgtttaaaaaaaaaaaaaaattgttatttggttttgtatagaaaaagtttggtaatttttgggatagggtattattattgaattatttttttttaagggattgatcgaatgttaggagtatatattgttaaagataagataatagttgtgtattttaaatttatgggtataggatagttgggtattagtagatataacgtgagggttattttatattagaagtaaattgtttttagttttttagtttgaaaaataattattgtttttagttaatttttaagatttatttttgttagttgttagtttttgttgggttatttttttttttttatttttgtaataatagtgataataaaaagatgagttatagtttatacgtgtgatggggagagattgaggaagtaagagttggaaggaaatttttttggtttgtatggatatttttttttttattattagagataaattatttttatgttatatgatttttattatgtaattagtatttggaagtatttatttttgtgaaaagatatttttaaagatgaaatacgtaaaattttataaaagaatgttatggttaaattaagtgtgggttttagagtttaatagttgatttttagttttaaggttgaaggttaggtttattattatggaaatagattttttagtggaaagtttagtggaagtaaggtgggtttttattttttgagtatatataggaatttagttttttagagtatttgaaatggttatgtttgtttttataggtgtgaaattttatttaatagaggattttttgatttgtgaaggttatagattaatgttttgaaatattagttttaaaaaataataataaattaggttaggtgtggcggtttatatttataattttagtattttgggaggtcgaggtgggtggattatttgtagttaggagtttgagattattttggttaatatggtgaaatttcgtttttataaaatatataaagattagtcgggtatggtggtatatgtttgtaattttagttatttaggaggttaaggtatgagaattatttgagtttgggaggtggagggtgtagtgagttaagtttgtattattgtattttagtttgggagatagagcgagattatgtttaaaaaataaataaaataaaataaaataaaaattaattttttttttaatttttttgtagatgataagatagatgtttggagaggtgatgtgatttatataaggatatttggttataaagtagtagagttggcggtagttttggggtttgtgggtagggttttatttattaggttttgtttgtttttttttattgttagtttgtggttgttatgttcgtgtgagagggaagttataaggagaaggcgtaaagatgtaatttttttttggttttttttttgtgttagatatgtatttatacgtatgaaatgaaaagagtttaagatgaagggtgttgtttttgagattggttatgtttgagggttattttaaaaggttatttgtagatatggatttttgtggtggttagatttcgggtttatttggttttttaagaaagttttagaaggaaaggttaaaatttatggttggaacgtttgtgggtaaaaatatttatggtaaatatgtttatttagtgtttaaatatatgtgtatttatgtgttaagttttttataggattgttaagagaattaggtttaattatttttatttttattttgtaagagaaaattaagattaagatgttaattaaattgtttaaagttatatagttattaagtgatcgagttgagtttaaatttaggttgttagttttaaaatttaagtttggttaattatgatgtttttttaattgatttgagtgggaagagaaggaaattttagattatggtggaaattgaggttaaaaataagtaatagggttaggtgtaatggtttacgtttgtaattttaatattttggtaggttgaggtaggtggattatttgaggttaggaattttagattagtttggttaatatggtgaaagttcgtttttattaaaaatataaaaattaaaaagtaaataaaaaaaaatataaaaattagttaggtatagtggtatgtttttgtaattttagttatttagaagattgaggtaggagaatcgttggaatttgggatacggaggttgtagtgagtcgagatcgcgttattgcgttttagtttgggcgatagagtgagattttatttttttgaaaaaaataaataaaaaaaaataagtaataggttagtggataatggtttgatattttagttattaagttagggtagacgaggttttttttgggttataagaggtagagtttagaggaaagtttttttgtagggttttgagatttttttgggtagtagtaaagaaggttttttatttgtgggtatgtgagttttatattttaattttttgagaaagggttgaagtgtattttaagatttgttatagagaagttgatggttttaagtttgttttataaataaatgtagattgttggaagtaggatgttattgggttattaaaattttagaaaatattttaatttaagtagtagagatagaaaaaaagaaggaattaagaaaaatgaataaataaaaaataattatagaaaaaatatagtgttttaatataggtgaattatattatagtgtattttggttagaattacggaaggtggggaagaaggggtgttatgatttttttttttgtttagaaagggagaatatattaaagtgtgttttggcgttaagttattattttgtttttatttttttagttgtaatatgggaggtaatagtatcgatttttcggaatggttggacggatttaaatgagataggttttggtatagtttttagtaaataataaatagtgaatatatggttgttgttaatattttaagatatgttatagtggtgtggaaatttttttttaaattgtttattgtattgttatttttttttttgttttttttattaattatatttataaaaaataaaaaattagtagtggttaagatattatattaatatgatataggtagataattatatttgatttttataatgaagtatgtgtgtttttattgttatagaagttgatttagaagtatataattttttttagtaattaggggaggggtggttgaggagagggggtggtttagtgatagatggtttggagtaggagggaagagtagggattttgttgttagattgtgtgtttatattttcgtgtattatttttgtgtgttatttgataagttattaattttggggaggttttaattttgttgtttgtaaaataaggataaaaatattattaattttattaggttggtatgaggattaaataagtaaatatacgtaaaatgtttagagtagtgattggtatataaatgttttagggttagttagttgttgttgttgttattatgattattattattattaaaatataggaggagttttagagtagaaggattgagtttagatggttttaagtagagtggattttaaagggatttgtatagtattttaagaatggtatttattggtgtttttaagtagtttatggtgataggagtgaaattttagtcgtcgattgttgatttatttttgttaaaagttacgttgtaatttaggacgggttgtaatttaggacgatgttttattgaggataaggttataatataggaaggagttgttatataattttagatttgtaatattggaaggtaaaagaattaaagttaggtttggaggagtagttggggttgaaattgaggtttaagaagggagtttatggttaaggtagtttagatttatgttttgagattggagtatttatttgaatggtagaagatagttaggacgagtagtagttcgaataggatagattttttttggatttttattgtgattgtttatagaatttggaaggaagggataggaaggaatgttaggaacgaataaatgattgttggttgttttaaaaattaagggttggaaggttaagaaggtttttgagaggaatatttatagggggagttaaggtatattgaatttttgggttatgttttagttttgatttatagtattatatatttttgagtaggtttagtttttataagttttagtgtgtattattatattgtgggaataatattattttttttattagggttagtgagttaaatgataatatgagtaaattgatttatatagttattgtggtttttattttattggttttattttaagttgttggttgaaagagagggttatttttcggagttatagtattaagtgaattagattaaaggggtgattttggaaggtattagtatgtatttagtagtggaatagggagtaatggtttagtatatttggaagttttggttttttattgtaagaagtataatggggatatttgtttgttttttttggggatatgaagagaggtattgagtaattttgtaagtttttattacgtgaatgtttagatgtgtagtgatagtattaggtgagaagaaggaaagtttgaaatgtttttaattttattttatttagtaaagaagttaaagtttagggaggttttgaatttgtttaagtataaagtatttatagtagaattaagaaattttttaattttaattttatatttttgaatttattttgaaataaggaggtggtagtgtttgtaaattagggtattttatattttattttttagagttttataggttcggatagatagatgggtttttggaagggtgagttatttattttttttaagttagaaatgtagagttttttggggaattgataattttgataattatttttgtttttttttttttatatattttgaaggttatttgttatttaggaatttgttgacgtaggttagtggaggattgagaagttttaggaaaagggtagggtttgatattgtttaaaaaagaaaataattagtgagttaagtttggagatgggggtggtggagatgagaaagaggtggttttatgatatgtgaggaattaggaagaaagataattgttatttggtttttttttataaattgagggttttttattattcgttgggttttgaaatttatagtttgttacgggatattattttttatgtggatttttttaggagatttgggttttagtatatgttagcggtttgtttggttttttatttttaggggtttttgagtaggaagggtgatttatagatttaggttagatagggttttagtatataaggaattgttataagtgagtagggagaggaaggtattggtttgaggttttcgaatagagagttttagatattttttaaaagttaagtatagtatgatcggagtttgggtattatagtgagattttgtttttataaaaataaaaatattaaaaaaaaattagattggtgtggtggtatataattgtagttttagttatttgggaggttgaggtgggaggatcgtttgagtttaggaggtaaaggttatagtgagttgtgattgtgttattgtattttagtttgggtgatatagtaaggttttttttttaaataaataaataaaaatttaatgtagttataatgttaggtatttttacggaaggaggaaggaaggaattttttgattcgggttaggtattggaaaggtgttaggttggtaggagttgtcggtttaggatattttttttggaatggtttttgatataaattatattgttataatatatagggtttttgatggggagttgttttttgaagtattttagaaagaagtggtttgttaagaaagtaggaagaatataatgaaagggtttagagtataggtattttagtttaatttggaggtttttgaataaggttagatagttttggttttgttatttttttgttatgtgttaatttttgattacgttttggttagtaagtatggagatagttatatgtattgtatagtataatgtttggttaaagatggtatttaaaaagttgtggttattgttagtgttatttaggagtaatgaggttatttgaggaagaaattgtgtggggagggagtgttggggggtgaacggtgggaaggtagatagagggtgatgtgaggtgaggaagttagagaaatattttgggttgaatgagtaggggagattttaggtattaaatttaaggaagtttttagttttttgggatggttggggagtgttaagttttagttttagttttatatgattggttggttgttgttatagttgattttatgatatgttgtaggggaagttaagatagtagagaaaggaagtagttatgtgtagatgttaaggtcgggttgttttattaaaataagattaggtttttatgaattattgttaaaatatgaatttttaagagtaaaacgtttatatggagtatgtgtatgtgtatggggggcggaggagggcgggaggtagaaaaagaaatagttgattgttttaaagttattttataaatgttttataatgtagatggtaattaatattaagtaagattatttatggttttttatttttttttttgattttttattttttgttattttttttttaaatattttataattaattaagtattatttttataattagaaatattaggaaaatttatatatgataatgttttttttttagtagttatagattatttattttttggtaaaattattttttagattaaaatattttttattttaaggaaaaaaaaaaaaaaaaaagaagatgtttataagttaagtgtagataagatggtaaatgaattaaaagtgttgttattttatttaaattaagtatttaaatgtaagatatatttagaaagtattaatatttaatttttttttaaatattttaggatttattaataacggtgggtttgtttttaacgattgttttaataatattgttattgttttgaatgatttttaattattttaaagaatgtataattgaaaaattttttaaagaagatatgtaggaataagtttttttttatgatgaaggaacggtaggtttttttgggtggtgcgtaagttgattttaaagttattttcgtaatgggagttttaagtaggttttttattataggaataagaaatagttaagggtatataaatattttttaaaatagtaaaaatttagtgatatatatatttaataataaggaaatgagtatattatggtatatttttatggtggggaatcgtatagttaggaaaagtaatgggcgtggaaggttatttataatgaattaagatttgttaagtaaatggaaagtaaaaaaagtaggggttgtaattttagtttttgataaaagattttaaattaataaagattaaaagagataaagaagggtattatataatggtaaggagattaatgtaataagaagagttaattattttaaatatatatgtatttaatataggagtatttagacgtataaagtaagtttttagagatttataaagagatttagatttttatataataatagtgggagattttaatattttattgttaatattagatagattaaaagataggaaattaataaggatatttaggatttgaatttagttttggattaagtggatttaatagatatttatagaattttttattttaaattaatagaatatatattttttttagtatcgtatggtaattattttaaaattgattatataattggaagtaaaatattttttagtaaatgtaaaagaatagaaattataataaattgttttttagaatatagtgtaattaaattagaatttaggattaagaaatttatttaaaatcgtataattatatggaaattgaataatttgtttttgaattattgggtaaataacgaaatgaaggtagatataaagatgttttttgaaattaatgagaataaagatacgacgtattagaatttttgagatatatttaaagtagtgtgtagagggaaatttatagtattaaatgtttataagagaaagtaggaaagatttaaaattgatattttaatattataattaaaagaattagagaagtaagagtaaataaatttaaaagttaatagacgataagaaataattaagattagagtagatgtgaaggagatagagatataaaagattttttaaaaaattaatgaatttaggagttggttttttgaaaagattaatagaatagattgttagttagattaataaagaaggaaagagagaagaattaaatagacgtaataaaaaatgataaaggggatattattattaattttatagaaatataaattattattagagaatattgtaaatatttttacgtaaataaattagaaaatttagaagaaatggataaatttttgggtatatatatttttttaagattaaattaggaagaagtcgaatttttgaatagattaataataggttttgaaattaaggtaataattaatagtttattaattaaaaaaagtttaggattagatggattaatagttgaattttattagaggtataaagaggagttggtattattttttttgaaattattttaattaatagaaaaagagggaattttttttaatttattttatgaggttagtattattttgatatcgaaatttggtagagatataataataataaaattttaggttaatatttttgatgaatatttatgtgaaaatttttaataaaatattggtaaattgaatttagtagtatattaaaaagtttatttattataattaagtcggttttatttttgggatgtaaggttggtttaatatatgtaaattaataaatataatttattatataaatagaattaacgataaaaattatatgattattttaatagatatagaaaacgtttttaataaaattt

SEQ ID NO: 39 - DNA, 5659 bp, Artificial Sequence
  chemically treated genomic DNA (Homo sapiens)
taatgattatttttagtgtttagttttttttttaagtaaaatatataattaatgttaggtaagttttttttaatggttttttagagagttaaacgtttttatgttgagttggaaatattgatgtttttttttttttgagatagagttttattttgttgtttaggttggagtatagtagtacgatttcggtttattataatttttgtttttcgggtttaagtgatttttttattttagttttttaagtagttgggattataggtatgtattattatgtttagttaatttttgtagttttagtagagatagggttttattatgttggttgggttggttttaatttttgattttaggtgatttgtttattttagttttttaaagtgttgggattataggtacggtggtgttcgattgatttttttttttttttttttttttttttttttttgagacggagtttcgttttgtcgtttaggttggagtgtagtggtgtaattttagtttattgtaagtttttttttttaggtttatgttatttttttgttttagttttttgagtagttgagattataggtattcgttattatatttagttaatttttttgtatttttagtagagacggggttttatcgtgttagttaggatggttttaattttttgatttcgtgattcgtatattttcgttttttaaagtgttgggattataggcgtgagttattacgtttggttcgattttttttttaaatgttggtttttttggttttaatattttgttattattttgataattaagaaatatgtttttgttttaaataataaagattaagagattatttgttttaggtaaatagaaaaatttttattattttttttaatgtgtttagtaaaattataaaggtaattatgttttggggaattaattattttatatagtatgaagtaaataaagttattttgtttaataaattaaataatattagttagttgaggggtataaagaatgaattaattttttttttttgttttattaattttttaagttttatttttaagtatttttgatttaaagataagattgtttttttttgattatttaatttttattatgtttattattaaagttaaagtagatgtaataagttttaatattattgaatttaatattttaattaatagaaatatagattatatttaggttgggtgtagtggtttacgtttgtaattttagtattttgggaggtagaagtgggtggattttttaggtttaggagtttgagattagtttgggtaatatagtaaaatttcgtttttattaaaaattgaaaaaaattagttgggtatggtggtacgtgtttgtagttttagttacgagaaaggttgaggtgggaggattatttgagtttagggaggttaagtttgtagtgagtcgtgatcgtattattgtattttagtttgggtaatagaatgattttgttttaaaggaaaaaaaagaaagaaagaaaagaaatgtagattacgttttagtagtttgggtgaaagttatgaaaataatttacgggaaaaaataattagtttgtgaaataatttttgtaatataattaagagttagtgagaggaggtgatagttaattaagtatgtgaaatgaaatgttttgtagttagttatatttttaggagggttatttttagtttatgtagtttttataagttgttttaatgttataaaaatattatttttatcgagtttatattatttttttggagattgaagagatatttaaattaaatttttgagtttttttttttagtttatttaagttaatttataaaaatataggggaaagaatatagttttaaaaaattaaaacggaaaataaaaaatgtagaaattatagtatgaagttaagagtttaaataagtttataatattaaagatattttatgagtaaaataagaaaattaagtagtaattatttagtttattgattatggttttttttggaatgtagtgaaagatttagttttgttttttgtatttattataggtgttaagagtttaaggagggtttaagattaagggaagttaaatattgttagggaaagtaaatatatgtttaaattattatttttaaataagtttattatttataatttaaaattattaatttttatgtggtttttgtaagtattttttaattttatttttaaataaagagaaattattacggaagtattttttttagaagataatttataattattatttaattcgatttttttttttttttttttttggaaattttggtatatggatttgttattattgttaagaattatttagggttaggcgcggtggtttacgtttgtaattttagaagtttgggaggtcgaggtaggtggattatttgaggttaggagtttaagattagtttggttaatatggtgaaatttcgtttttattaaaaatataaaaattagtcgggtatggtggcgggtatttgtaattttagttatttgggaggttgaggtaggagaattatttgaatacgggaggcggaggttgtagtgagttaagatggtattattgtattttattcgtggtgatagagcgagatttcgttttaaaaaaaaaaaaaaaaaaaagagagacggagttttagttttgttgtttaggatggtatgtagtaatacgatttttgtttacggtaatttttgttttttgggtttaagtgatttttttgttttagttttttgagtagttgggattataggtatatattattgtgtttagttattttttgtatttttagtagagacggggttttatcgtgttggttaggttggtttcgaatttttgattttaggtgatttatttgtttaggttttttaaaatgttgggattataggtgtggtgagttattgcgtttagtttttttttttattttggggaatattttattttgtttatggagtagttgttgttttattattttatttttttaataaatttgtttatattttgtattgcgattcgttttgaattttttttgtatgagatttaagaatttttttttgtggtttggattgggattttttttttgtaataaatgtattggttgataggagaataaagaaaaaaaaagaggaaaaattagagtaatttttttatataattatattatatgatcgttttgttaattatgataatagttaataaaataatttttttatgtttaatttttagtttatgtttgtatgttttaaaatgttttttatagttggtttgtttaattatttaatgaaggattaaatattgtagttggttgttatgtatttagttttttaattttgatttttagattatttttagtttattttattatattcgttttaagttttttgagttagttaattttaatttgttatgtattttataaaatgttttttttttttttatagtcgattgtttttttgtttttggagtttttttttttattttttaaggttattttgagtatatttttttgtttcgtgaaatttatttttttttttttttttttttttttgagtttaattagttgttatcgtaggtttttgtttttttttatagtgtggttagaattcggttttgtttgttagtagagggtagggtcgttgtttttttttttttgtagtttttaagtttagtatatgtttggtatttagtggtagtataataaggaatttgatgaatattttttttttttgtttttcgttttttttttatagtttgttagttatggttaggaagagtaagattcggaatgggtttggtgtgtttcgcgggaaggtcgtgattttggaagatgttttttagtttagttcggattttttttttttagttttagagattttttttattttttgtgtatatatatatattaagatttaggaagtggtttttgaggtaggattttaagagtttaaggagtggggtcgaggttggaggtgtgggggtgtgacggtcggttttatttttcggtttgtttagattagttttttttggggattatttttggtatataagggagggaggtagtttgatttttttagttcgtttttagtttttatttggttttgttttttgggataagacggggaaatttagaggatgtaagttttttttgttttcgtgtttttttttaagttttcgttattatagacggatgtaggagttgtttgggaggttggaagtatagattttgttaatttttttttagagggcgggattcgacgcggacgtgttttgattgattgggtagcgtggtttcggggaagggtttttttttttttttttagattaggatttttggaaaatggagaagttgtgttaatagaggggggttagaaatttttattttagaatgttgtagaatgttgggagatatttaggatgtgagttagggattttttggaagtgtttgttttggttttattcgattttaggtagtttttagttgtttgtatagtcggatggggagggggtttgtatagagttggagttagaggagagagttggtttattttttacggtaggatggggaaattttatagattatattgttattcggttttagtttttcgtttcggcgtttagagggtaatttttatttatttcgttcgtttttttgaattagagtgatttaggttgcgtttcgtttcgtttttttatttcgagttggtacggaggtatagcgttagaggggggttttaggcgtttcgaggttttgtttttgcggttttttttttgcgggggtgggcgttttttttcgggtaggggttacgtggttttggtcgggcggggggttcggtttatttcgcgtcgggtttagtgatttaggtcgtagttgttatcgcgttatatgagggaggtcggcggttattcggcgggggaggggatcgtggttggagttcggggcggggtcgcgcggtaggcggggcgggagtcggggggcgtagttagagagtttcggagtcgcggcgggagaggaacgcgtagttagttttgggaagtttaggtgaggtcgcggggattcggcggatttcggcgcgggttgggagagattattcgtagtttttttttttagggttcgttttaggttcgcggagattcgttcggcgttttttagtcgttttggagtaattttgtttcgaagttttttgggttcgggtagggtgtggcgggggtgttggttgtattttttttttttttggtgggcggggaggttagagtttaggggaaaggggttggggcgggggtcggggttgggttgaagatcgtttttttaggttgggtgttgggtggggaaagggtgtttgacgttcggagattggcgggtcgagggtcggcgttaggtttaagtttttgtcggcgtttttggatttgttttgggttttagaggcggcggggcggggttcgggtttcgcggtcgtcgtttttattttttttttgcgggtaaagagggggttgggagacgtggattcgatcgcgggttttcgggtgggaggggtcgggaatcggggtcgtgaagggaagttttcgagggtcggtcgggagttcggaaatcgaggttttttttcggttagttttaattttttcgtttttttttttgttttagg

SEQ ID NO: 40 - DNA, 5659 bp, Artificial Sequence
  chemically treated genomic DNA (Homo sapiens)
tttggggtagaggggagggcggggggattaaaattggtcgaagggggatttcggttttcgggttttcggtcggttttcgagggtttttttttacggtttcgattttcggttttttttattcggaaattcgcggtcggatttacgttttttagttttttttttattcgtaggagaggggtgggggcgacggtcgcgaagttcggatttcgtttcgtcgtttttggggtttaggatagatttaagggcgtcggtaggggtttgagtttgacgtcgattttcggttcgttagttttcgggcgttaaatattttttttttatttaatatttagtttggagaaacggtttttagtttaatttcgattttcgttttagttttttttttttgggttttgattttttcgtttattaaaaaaaaaaaaagtgtagttagtattttcgttatattttgttcgggtttagggaatttcgaagtaaagttgttttagggcggttggagagcgtcggacgagttttcgcgggtttggggcgagttttggaggaagggattgcgggtggttttttttagttcgcgtcgaagttcgtcgggttttcgcggttttatttgggttttttaaggttggttgcgcgtttttttttcgtcgcggtttcggggttttttagttgcgtttttcggttttcgtttcgtttgtcgcgcggtttcgtttcgggttttagttacggttttttttttcgtcgagtggtcgtcggttttttttatgtgacgcggtaatagttgcggtttgagttattgggttcggcgcggggtgggtcgagtttttcgttcggttagggttacgtggtttttattcggaagaaggcgtttattttcgtaaagggaaagtcgtaagggtaagatttcggggcgtttggggtttttttttggcgttatattttcgtgttaattcggggtaggagagcggggcggagcgtagtttgggttattttggtttagagaagcggacgaggtgggtgagagttattttttgagcgtcggggcggagagttgaggtcgggtgataatgtggtttgtgaggtttttttattttatcgtaggggatgagttagtttttttttttggttttaattttgtgtaagttttttttttattcgattgtgtagatagttggggattgtttggggtcgggtggggttagaataaatatttttagaaagtttttggtttatattttgggtgttttttaatattttatagtattttagagtggggatttttggtttttttttattagtatagtttttttattttttagggattttagtttgagaaaaggggaggaagttttttttcgaagttacgttatttagttaattaagatacgttcgcgtcgggtttcgttttttgggggaggattgataaggtttgtgtttttagttttttagatagtttttgtattcgtttgtgatagcgagggtttgggggaagatacgaaggtaggagaggtttatattttttggattttttcgttttattttagaagataaagttaggtgagggttggaagcgggttagggggattaagttgttttttttttttgtgtgttaggggtggtttttagaaggagttgatttgaataggtcggagagtaggatcggtcgttatatttttatatttttagtttcggttttattttttgggtttttaaggttttgttttaagaattattttttgagttttagtgtatgtgtgtatataaagaatgaaagaagtttttagagttaaaggaaggagattcgggttgggttgagaagtattttttaggattacggttttttcgcgggatatattaagtttatttcggattttgttttttttgattatggttggtaggttgtggaggaggagcggagagtagaagaaaggagtatttattaggttttttattgtgttgttattagatgttaggtatgtgttaggtttgggggttgtaaggagaggaagatagcggttttgttttttgttagtaggtagaatcgagttttggttatattgtgaagaaaggtagaagtttgcggtggtagttggttaagtttagagggagggaaagggagaggagaatggattttacggagtagaaggatgtgtttaaggtgattttggagaataaaggggagagttttagggatagagaagtagtcgattgtggaaaaaaaaggagtattttgtaaagtatatggtaggttggggttggttggtttaaagggtttgggacggatgtggtgagatgggttgaaggtggtttgaagattaagattgagagattagatatataataattaattgtaatgtttggttttttattgaatggttgaataaattagttgtgaaagatattttgggatatatagatatggattgagaattagatataagaaaattattttgttaattgttattatggttaataaaacggttatataatatgattatgtagagaagttattttagttttttttttttttttttttttatttttttattagttaatgtatttgttataggaaaggggttttaatttagattataagagagggtttttggattttatgtaagaaagatttagggcgagtcgtagtgtaaagtataagtaagtttattaagaaagtaaagtggtgaaataatagttgttttatagatagagtaggatgttttttaaagtaagaggaggggttaggcgtagtggtttattatatttgtaattttagtattttgggaggtttaggtaggtggattatttgaggttaggagttcgagattagtttggttaatacggtgaaatttcgtttttattaaaaatataaaaagtagttgggtataatgatgtgtgtttgtagttttagttatttaggaggttgaggtaggagaattatttgaatttaggaggtagaggttgtcgtgagtagaaatcgtgttgttgtatgttattttgggtaataagattgaaatttcgttttttttttttttttttttttttttgagacggagtttcgttttgttattacgggtggagtgtagtggtgttattttggtttattgtaattttcgtttttcgtgtttaagtgatttttttgttttagttttttaagtagttgggattataggtgttcgttattatgttcggttaatttttgtatttttagtagagacggggttttattatgttggttaggttggttttgaatttttgattttaggtgatttatttgtttcggttttttaaatttttaggattataggcgtgagttatcgcgtttggttttaaataatttttaataatagtagtaagtttatgtattaaggtttttaagaaagaggagggaagagaatcgagttgggtagtagttataggttgttttttgaaaaaggtgttttcgtgatagtttttttttgtttggagatagagttaagaaatatttgtagagattatatgagaattaatgattttggattgtgaatggtagatttgtttggaggtgatgatttagatatgtgtttgttttttttggtagtgtttggttttttttgattttaagttttttttaggtttttgatatttgtgataaatgtaggaggtagggttgaattttttattgtattttagaggaggttataattagtggattggatggttgttgtttagtttttttattttgtttatagggtgtttttgatgttataggtttatttgaatttttagttttatattatagtttttgtattttttgtttttcgttttgattttttaaaattatgtttttttttttatgtttttataggttaatttggataagttgaaggaaagagtttaaagatttggtttgaatgtttttttaatttttagaaaggtaatgtaggttcgatggaagtaatgtttttgtgatattagagtagtttatgggaattatataggttggaaatgatttttttgagaatgtagttggttataaagtattttattttatatatttgattgattgttatttttttttattgatttttgattatgttataggaattattttataagttgattgttttttttcgtggattgtttttatagtttttatttaggttgttagagcgtggtttatattttttttttttttttttttttttttttttgagataaggttattttgttgtttaggttggagtgtagtggtgcgattacggtttattgtaggtttgatttttttgggtttaggtgatttttttattttagtttttttcgtagttaaaattataggtacgtgttattatgtttagttaattttttttaatttttggtagagacgggattttgttatgttatttaagttggttttaaatttttgggtttaagggatttatttatttttgttttttagagtgttgggattataggcgtgagttattgtatttagtttgagtatggtttatatttttgttggttaagatgttaaatttagtgatgttaaaatttattatatttattttaattttgataataggtataatgggaattaaataattaggagaagatagttttgtttttaggttagaagtatttagaaataaaatttggaggattggtggaataaaaaaaaaaagttaatttattttttatgttttttagttaattgatattatttagtttattaagtaagatgattttgtttattttatgttatgtggggtgattggttttttagggtatagttgtttttgtagttttgttaggtatattggagaaaatgataaggatttttttatttgtttagagtaggtggttttttaatttttgttgtttagaataagaatatgttttttggttgttaaagtggtggtagggtattaaaattagaaaaattagtatttaagaaaaaaatcgggttaggcgtggtggtttacgtttgtaattttagtattttgggaggcggagatgtgcggattacgaggttaggagattgagattattttggttaatacggtgaaatttcgtttttattaaaaatataaaaaaattagttgggtgtggtggcgggtgtttgtagttttagttatttaggaggttgaggtaggagaatggtatgaatttgggagggggagtttgtagtgagttgagattgtattattgtattttagtttgggcgatagagcgagatttcgttttaagaaaaaaaaaaaaaagaaagaaagaaaaaaattagtcgagtattatcgtgtttgtaattttagtattttgggaggttgaggtgggtagattatttgaggttaggagttgagattagtttagttaatatggtgaaattttgtttttattaaaattataaaaattagttgggtatggtggtatatgtttgtaattttagttatttggggggttgaggtgggagaattatttgaattcggaaggtagaggttgtagtgagtcgagatcgtgttattatattttagtttgggtaatagagtgagattttgttttaaaaaaagaaaaatattagtatttttaatttagtatgaaagcgtttagttttttagaaagttattggaagaaatttatttgatattggttatatattttgtttgggaaaaaaattaaatattaaaagtaattatta

SEQ ID NO: 41 - DNA, 5291 bp, Artificial Sequence
  chemically treated genomic DNA (Homo sapiens)
gttttatgtggtagttttttgttataagtttttttttagttattgggttagtttataaggcgtttatagtttgttgagtttagttttttaatttgtaaaataagtaggttgggttttttaagatttttttaagtgtaaaataataattgtttttttttttaaattttgttatataaataattgttaatttaggattttttttattttatgtttatgtaatttattttttgaattttaaattttattttttaataaatgtttgttgtattattttttttttattttaattttgatttatttattttttgagggagggttttattgttgtttaggttagagtgtagtggtataaatatggttgatagtagtttcgtttttttgggtttaaataattttttttatttagttttttaagaagttgagattataagtatgtgttattatatttgtttaatttttaaattttttgtagagatggagtttcgttgtgttggttagtttggtttcgaatttttaggtttaagtgatttttttattttagttttttaaagttttgggattataggtatgagttattgtgtttgattttgttgttattattattattattattattattttttttgagatagagtttcgttttgttatttaggttggagtgtagtggtattattttggtttattgtaatttttgtttttcgggtttaagcgatttttttgttttagttttttgggtagttgggattataggtgtgcgtcgttatgttcggttaatttttgtattattagtagagacggggttttattatattggttaggttggtttcgaaattttgattttgtgatttgtgtattttggttttttaagggataataggcgtgagttatcgtgtttggtttgttgttattatttttatgatattttattttgtggtttggagttattattttgttttgttgtaaggtttgaattttgagttggttttttgatgtatttgttttttagttttgtgttattaagtatagagaacgtgttttttgtgttattatttgaggtaggattaaggagaggtttggggtaagttatcgaagatttatttgtattttttggttttagtgattaaagaaatttaagttttttttatggtgtaattaggtggtttattttttttttttttgattttgaagtttttgtgatagattttaaagaggcgtttgtaaagtttatatttagtgtgtttttagtaattatatttttgattgaggttagattattttgtattttatagatggaaaattgttatttgtttaaagttatatattgtggtaaggttggtttttttaattagagtttttttattttttttattatattatgttttttttatagtttacgaaatttttgttgttttaataaattatatatttggtggtttaaataatataaatttattgttttatagttgtggagattaggtcgatataggttttattgggttaaagttaaggtgtttgtagggttggtttttttttggatgttgaaggggaaaatttgtttttttgttttttttagtttttagaggttttttgtattttttggtttaaggttttttttttgtatttttaaaattaggatttatgggttgagtgttttttttgtggcgtttttttggtttttttttttttatcgaatttttttttttttatgatgggaaaggtttttttttttaaggatttatgtgattagagtgtgtttattaagataaaataggataatttttttatttaaaggattttgattaatatagttatatttatattttgttaggtaaagtgatatagttataggttttggggattcgggtgtgaatatttttgggaggttattattttggttattatattttgttagtaaattagggtttttcggaggttagtgggttaaagtaatgaagatagatatagtttgatttttagagttttaggagatgttttcgatgttttgatatagattgtattaatgatataaagttgattaggtgagtttttttttatatggtaaattttatttgatgtttttatggttgggttttttttttttgttaatcgtaaatatttattttttgtaatgagtagtggggaggttaggagagggtaaaatatgggtgttagtgtttgttttttaggtttttagatgatgatagtatggttttggaaaagttgaaatgtatagtattgattttttattttttaaaagttttttgatatttgggtagtagaggtatagtttggagttataggtattttttttgatgtttagtttttaaatgtaatgtgaatgttaaaattgtaaagattttaagtgatatacgtggggaaggggaaggattttatttttttattttgtttataaaggaaggttataagttggtttaagatagaagcgaatgcggtttgtgatgaaaagatatgtaattattattaaaagagttaaagaggagaaaaatatagaataagtttggttaagatatttaagatattgcggtgtgtagttttatttggggattttttttttttttttatttttttttatttttggagatagagttttattttgtggtttaggatgggtataatttcggtttattgtaatttttgtttttcgggtttaagtaatttttagtttttttagtagttggaattataggtatatgttattatttttagttaattttgtatttttaatatagatgggattttattatgtttgttaggttagttttaaatttttgattttaggtgattcgtttattttagttttttaaagtgttgggattataggtgtgagttattatgtcggttaggagattttttttttaagtttttttataggttaagttaggtagtaagtttatgtattttatttttttttttttttttggagatggagttttgtttttgttgtttaggttggagtgtaatggtgtgattttggtttattgtaatttttattttttgggtttaagcgatttttttgttttagttttttgagtagttgggattataggttcgagttattatattaggttaatttttttgtattttgtagtagagacggggttttattatgttggttatagatatttttttgagtgtagattagaagtttggttttggtattttatttggtatttatattatgtttatttgtgtattggatttgaaaattgggatattttatagtttgtggaatttttgtaaatgtttttgtaattgatttatttatatattgtttatatttattttttgtatattataggtttaagtatttgattttttttattttatttatttttgttattagttgttttatatttttttatttatttttagggtttttgaggtttttagggagttattattatatattattttttgtatttgggggaaggtttaggttgttggaaattttaattaagtaaggatagttaatagttgtagaggtattttaggaaatagtgagttttaaaaaggaaatatttgtaggattttttgtgatgatttttgacgatttttttgaaaatgattcgttattttttgttatggaaaataatagtgattataggtagtttttagtttatagaaggtttttttttttaggtaggttttgatatagtcgtttattttatagatgttttaatagattgtaaagttttgggaatatgtatatttatgtatatatatgtatacgtgtttttttataagtatatttttgaggttatagttttgttttagtggttattttttttagggttggttgggcggagttattggtagagttttagggtttttggtagtgttttgttatatattattaattattcgagttgttggtatgtggtgaggatttttttttttttttttttttttttttatagttgtaggagggggattttgcggggcggatgttattttgttaggggcgggttttttttatttttatattatattttgttttagtttttttttatttcggatgtaggttattttggggtttttagtaggggttatatttcggtaaaagaatattagggagtatttttgggtatttttgtttagtagtttttttttttttaattggtttttttttttttttattagttaggtttttattatttatgagggtttcgcggtttttgggtttttcgttataaatgttttttttttttttggggttgggtgggaagggatagttttgggattttttaaagaaagaattttgttaggaaagtaagagacgaattaaaattaaattaagaaaatgttaagattttcgttggttcggaatttgcgttcggtttttggttttgttttgtttttttgttttgattttatttaggaagttgtagtttttttaagttttttgtaatttttttgtttatttgttttttggttttttatgagggtgtatggggggtagtgttgttatttgtttttttagaggtgttgtagttatggtttttttttatttttatttttggtttaggtttgtttttgaatttttagttattggaatttttaggatgatgagaagcgagggatgtaaattaggaatttttagttttatggggagaacggagttttattttggagttggggagatcgtttgggttagtgtagttttagttatatattataagttttagtggataaggtagttaggaggagggtggggtagattagggtagataattagaaggatcgagtttggggtttagtatggtttatatgggtttaagatgtatggagaggaagtatagggaggatatggggataggtttattttttatttttgtgttttggattttagcgtttttttcgtggtttttttggttttggtttagggatgttttttgttttattgagtttatttgtttgagatttgttaatattttttttttttgtgattggaagttatagggttaattgttaagtcgtgtagttatagagggaatatagagtttagttgtaaacggatagagacgagaggggtaagggaggatagtggatgatagggaagacgagtgggggtagagttgtttaggattatggttgaggttattatttatgtagatttgaggtttgtgaaggtttttttgaagaagagtatttttagtcggttaggatagggtaagggggatgaggtttttttttgattttgtatttttatttttcgttttatagattttatttttaaattttattttggtttttttttttttttttttaga

SEQ ID NO: 42 - DNA, 5291 bp, Artificial Sequence
  chemically treated genomic DNA (Homo sapiens)
tttagagagaagagaaaagggattaaggtgggatttgggaatgggatttgtggggcgggaagtggggatgtaggattaaggggaggttttattttttttattttgttttaatcggttggagatgtttttttttaggggagtttttataaattttagatttgtataggtgatggttttagttatggttttgagtagttttgtttttattcgttttttttgttatttattgtttttttttgtttttttcgtttttgttcgtttataattaggttttgtgttttttttgtgattgtacggtttagtaattggttttgtgatttttagttataaaagaggaaggtgttagtaagttttaaatagatgggtttaatgaagtagaaggtatttttgggttagggttagaggggttacggaggggacgttgaggtttagaatataggggtaggggatgggtttgtttttatgttttttttgtgttttttttttatgtattttaaatttatatgggttatgttgggttttaaattcggtttttttggttatttgttttgatttgttttattttttttttggttgttttgtttattggggtttatgatgtgtagttggagttgtattgatttagacgatttttttagttttagggtgaggtttcgttttttttatgagattgggggtttttggtttgtatttttcgttttttattattttgggggttttagtaattgggggtttaggaataggtttgggttagaggtgaaggtaaggaagagttatggttgtagtatttttggaaaggtaagtggtagtattgttttttatgtatttttatggggagttagggagtaggtgagtaagggagttgtagagggtttaagaaggttgtagttttttaggtgaagttaaggtagaggagtagaatagagttagaggtcgagcgtagatttcggattagcggaggttttgatatttttttggtttggttttggttcgttttttatttttttagtaaagttttttttttaaaaagttttaaagttgtttttttttatttagttttaaggaaaaagggggtatttgtggcggaggatttagggatcgcgaggtttttataggtggtgggggtttggttgatggaggagagagggaattagttgggggaaagggggttgttgagtaggggtgtttaaaggtgttttttaatgtttttttatcgggatgtgatttttattaggaattttaaaatggtttatattcgggataggaaggagttagaataagatgtagtgtgggggtgggaagaattcgtttttagtaaagtgatattcgtttcgtagaattttttttttgtagttgtggggaggaaaaaggaagggggaaaaggtttttattatatgttaatagttcggatgattggtggtgtgtggtaggatattgttagggattttagagttttgttaatagtttcgtttagttagttttagaggaagtggttattgaggtaaagttgtgattttaaaaatgtatttgtagagaggtacgtgtgtatgtgtgtgtatggatatgtatgtttttaggattttgtagtttgttagggtatttgtgaggtgagcggttatgttagagtttgtttggaggaggaagttttttgtgggttgaaggttgtttgtgattattgttattttttatggtagagaatgacgggttatttttagaaaagtcgttaaaggttattataagagattttataagtattttttttttgaagtttattgttttttaaggtgtttttgtagttgttaattgtttttgtttgattaaagtttttaataatttagatttttttttagatatagagagtggtatgtggtggtgattttttggggattttaggggttttgagagtgagtgggagggtatagagtagttggtggtaggggtgggtggggtgggaagagttaaatatttgaatttgtggtgtatagggggtgggtgtgggtagtgtgtgagtaaattaattgtaggaatatttgtaggagttttataaattgtagaatgttttagtttttagatttaatatataggtgaatatgatgtagatgttaggtaaaatgttaaaattaagtttttagtttgtatttaaaaaggtgtttgtggttaatatagtgaaatttcgtttttattataaaatataaaaaaattagtttggtgtggtggttcgaatttgtagttttagttatttaggaggttgaggtaggagaatcgtttgaatttaggaggtggaggttgtagtgagttaagattatattattgtattttagtttaggtaataagagtaaagttttatttttaaaaaaaaaaaaaaaaatggaatatatgggtttgttgtttaatttgatttgtagagaggtttaagaaggggattttttggtcggtatggtggtttatatttgtaattttagtattttgggaggttgaggtgggcggattatttgaggttaggaatttgagattagtttggtaaatatggtgaaattttatttgtattaaaaatataaaattagttgagaatggtggtatgtgtttgtaattttagttattagggaggttgagaattgtttgaattcgggaggtagaggttgtagtgagtcgagattgtgtttattttgggttatagagtgagattttgtttttaaaaataaaaaaaaataaaaaaaagaaggggatttttagatggaattgtatatcgtaatattttgaatgttttaattaggtttgttttatattttttttttttttagtttttttggtgatggttatatatttttttattataggtcgtattcgtttttgttttagattagtttgtagtttttttttgtgaatagggtaagagagtaggatttttttttttttttacgtgtgttatttggggtttttatagttttgatatttatattatatttagaggttggatattagaaaagatatttgtaattttaagttgtatttttattgtttaaatattagggaatttttaagaggtgaggggttagtgttgtatattttagtttttttagaattatattattattatttgagagtttggagggtagatattaatatttatgttttgtttttttttggtttttttattatttattatagggaatgggtgtttacggttgataagaggagggggtttaattatgagggtattagatagaatttgttatgtggaagggggtttatttgattaattttgtgttattgatatagtttatgttaggatatcgggagtattttttaagattttgaaagttaggttatatttgtttttattattttaatttattggttttcgggaagttttagtttattgatagggtgtggtagttagaataatggttttttaaaaatgtttatattcgaatttttagaatttgtgattatgttattttatttgataaaatgtagatgtggttatgttaattaaggttttttagatagagagattattttgttttattttggtaggtatattttgattatatgagtttttgaaagggagaattttttttattatgggaagaaagagattcggtgagggaaggagggttagagagacgttataggagaaatatttaatttataggttttgattttgaaggtgtaggaagaggattttgagttaaggaatgtaagaagtttttgagagttggaaaaggtaaggaagtagatttttttttttagtatttagaaaggaattagttttgtagatattttgattttagtttagtgagatttgtgtcgatttgatttttataattgtaagataataaatttgtattgtttaagttattaagtgtgtaatttattagagtagtaagagtttcgtgaattgtggaggaagtatgatgtaatagaaagaatagggagattttggttaaagagattagttttgttatagtatgtgattttgggtaagtgatagttttttatttgtaaaatataagatagtttgattttaattaagagtatgattgttggagatatattaggtgtggattttataaacgtttttttaaaatttgttataaaggttttagagttaggagggagaaaaatgggttatttgattgtattatgagggagatttggatttttttgattattgaagttaaagagtatagataggttttcggtgatttgttttaggtttttttttggttttgttttaaatggtgatatagaaagtacgttttttgtgtttaatggtatagagttgaaaagtaaatatattaaaaggttaatttaagatttaagttttgtaataaggtaaaatgatggttttaaattatagaatgaaatgttataaaaataataatagtaggttaggtacgatggtttacgtttgttattttttgggaagttaaggtgtatagattataaggttagaatttcgagattagtttggttaatatggtgaaatttcgtttttattaataatataaaaattagtcgggtatggcggcgtatatttgtagttttagttatttaggaggttgaagtaaaagaatcgtttaaattcgggaggtagaggttgtagtgagttaaggtggtgttattgtattttagtttgggtgatagagcgagattttgttttaaaaaaaataataataataataataataataatagtaaagttaggtataatggtttatgtttataattttaagattttgggaagttgaggtgggaggattatttgggtttaggaattcgagattagattggttaatatagcgagattttatttttataaaaaatttaaaaattaggtaggtgtgatggtatatgtttatggttttagttttttgggaggttgagtggggaggattgtttgagtttaggagggcgaggttgttgttagttatgtttgtgttattgtattttggtttgggtagtagtgaaatttttttttaaaaaataaatgaattaaaattaaaataaaaaaaagataatatagtaagtatttattgaaaaatgaaatttggaatttaaaaaataaattgtataagtataggatggagggagttttgggttaataattgtttatgtaataaagtttgaggagaaaggtagttattattttatatttgaagggattttagagagtttagtttgtttattttataaattgggaaattggatttagtaggttgtaagcgttttataaattgatttagtgattggaaagaagtttgtgataaaaggttgttatatagaat

SEQ ID NO: 43 - DNA, 6117 bp, Artificial Sequence
  chemically treated genomic DNA (Homo sapiens)
cgggagttagggagagtatagaaattaattaaatgtaagtgtattttcgaggagtttattattaagaagtggatatataaaggaagatgatgatgattagagaattatatatgcgagatttaaggtaatttacggagaaaaagattggagtgttttaggaaggttttataaggtggtgtatttgagtttagaaagaggaataggagagaagtttttagaagtgaaggaggtgaattaagatggttattggtgtggtggttggaagggttttggtggtttgtgagagcgagggttttatttgttgttttataaagttattgtttatagttggagggatttggggtatgggtgtgacggtttattaggttatttggtttttgcgtgtttaaattttattattagggggggtataagagttaaagtggattttgagtttgagttggggttttttttttagagataggacgttttgagggaagggaggaaaagtttttttattttagtattataaagtttggaaggtttggttgtttttatgtgatttttgatttaggggtttatttatatttttttttttcggttaaggtaaaatataatttttttatcgtttatttttttggttgtttgtagtattaattgtttgtaataaatgtattttggtttaggggtttattgtgatatagaatgttaggaggaatgaaagatattttttgatttaaaatgttgtgaattaaaaagtatttgagataggttttaattaatttagaaagtttattttgttaaggttatagatgggcgtttaggaggtagatttgtgttttttgtaaagatgattttgagggttttaatatttaaaaggcggttggtggggaaagaggaagaaagtttttttaaggtgtgggtaggtaagaaataaacggttgtatttttttgagttattgattatttttttattgaatgtataatttatatggtagaggagggtagagaaataagttatttatgttttgtttagtatagcgaatttttatttttatattggaggaagtaattagatatgtatttgttttaggtgagtagagggatgattttgagttttgtttttttttttgtatttgtgaagatatgttattaatttatattgttatggtgaaatttaatagaattgttttagggtaaatattatagggtttattagaaatttttttatgggtaaattgtgaaagaagtgtatagttgtttttttttttttttttttttttgagacggagtttggttgtgttttttaggttggagggtagtggcgcgatttcggtttattgtaagttttgtttttcgggtttacgttatttttttgttttagttttttgagtagttgggattataggcgttcgtcgttacgttcggttaatttttttgtatttttagtagagacgaggttttatcgtgttagttaggatggttttgattttttgattttatgattttttcgcgtcggttttttaaagtgtttggattataggtgtgagttatagcgtttaataagaagtgtatagttttttttgttttttttttttgagacggagttttattttgtcgttaggttagagtgttgtggcgcgatttcggtttattgtaatttttaattttttggtttaagggatttttttgtttttgtttttcgagtagttgggattataggtatgcgttattatgtttggttaatttttgtatttttagtagagatgcggttttattatgttggttaggatggtttcgatttttttatttcgtgattcgtttattttggttttttaaagtgttgggattataggcgtgagttattgcgttcggtcgagaagtgtatagttttttaaaaaatttttgtagttattttatttaggaatgggaggtaggtttgtttgtggtagtttttagtttgatttttttttttggtttattgattttggggttttaagatttattttttttttataatatttttgtataggtgaggagattgaggtttagagaggaggttgtttgtttaatatagattaaagggttagaattaagagtagaatttagatttttttattttaggtttaatgtttttattatataaaaaggatgttttgattatacgaatgtggtattgaattatataggttgattttaattttttttttagtgtaaataataataggaataggagtaataggtagcgtttttgtagcgtttttgtggtaggtaggttttaaggtttttttgtggattttttttgttaatatttacgtttattttaataagtaatttttattataaatttaaatatttattgaattttttttattagtatttgttaatttgggagaagggggagatgtaataaaatttttttttttttaagatttgttttttaagatagatggacgtaggtttaaaagggtataatggaatattgattgtttttcggttttttttttattttttagggtgttttatattttttttttgtgttggaattattttggatattggttaggatgtgtaaagttaagtattattaaaatttttttgtttgtttttttggtattaggtttagtttaggttttgtttttttttttttgtttttttttttttttatgtattattatcggttgtttttttagtgtagttagttgttcgtttttgtgtttttgtatatttagtttttttttggaattttttttttcgtattgattattgattttatttttttaagttaagttagttgttgtaatgttttttgttttggggagtttttcggatttagattgacgtggggatgtgttttgtgtttttatttgttattagtttttgttgttttgtttttgatttttttttttttttttcggtttgatattttatggggttttgttttgttttttttaggttttattttattgtttcgtttttatttattttttttttatttgaattattttatagttttttagtagatttgtatttggtttttagtttaatttttatttattattgttttttttatattatttgattgcgtttttttaaatataatatttttatgttttatgtaatttcgtaaagtattgagttaaggattggagatgttaataatggttttggtttttaaggggttttttatttgttttttcggtttttttttatttaattatttaaaatataggtagagaatttttgaaaatatagtagatttaattatttttttgtttgaatttttcggtggtttttaatgtttagagtgtaaagtttaggagtataaggtttttttttatttttttataaattatttcgtgattttaggttttagtttagagttcggatagtttttgttttagtttttgtttaggatttttttttggcggtaattttttttgtggttttgtagtattattttttagtttgggttagaggtttttttttagttttttagtttttaagttttttttcgtaattgtatttattatttttaaattattgtttggttgtttgtttttttttatattggtttttgagtagaaataaggattaatttatgttttttagtttttatttttaatgaaatattttaatagatattgaaaaatgtttttgaattaatgagataagtttattgataataaataggtaaataatagtaatgtgttaatagtggttgtttttggtgagtagaattttgaggtttgttttttttattttttggtatttcggttgtttttgtaatgattgtattttgtttttgtaattataaaggatagtaaaggaaattttattttgaaaataatataaagggattcggggattttaaaagaaggtgatttttttcgtttattttagagaattaggaaaggagtgtttaaagatttatagaatttttataagtgacgttgggggggggttagttagttagggcgtatgtcggttagcgagtggggtgggttttgggttcgggagaagttagattagtgttttgtatagggttttgagggtaagacgaggaatttcgatttaggtttttgaatttggagagttatagaaagtttgtgagtttaggagaagcgtttcgagttcggtatttggagtagtttaaggtagtagcgagtaagtttaaagacgtaggagggagggtggggtggaggagtagagagaaaatagaagtcgtttatagattttttttttttttggggtaattaaattttaagtgtaggaagcgtttggggattgtttagtttttagttgtgttattattcggtgataggtatttgttaattatttttaaaagttttttatttgttattttatttagattgcgcgtttttaattttttttattttatatgttgtgtttaatgaaaagtatggttagcgagcgaaggtttgtaaggagatagacgagggcgaaattaagttaggcggtttttttttaaattttcgtaaagtagaagggttttttattttggtagtaggttttggttaaggggtttttagttttgacgattcggggaagagttttttaaagtagaacgttcggttcggcgtttagattaaacgcgggggaatcggaagggcgaggtttttacgtaagttcgcggtaaaagtggtagggagtggttgtttgtaaagattttaagacggtttgaagaaggagtgggtggcgggtgggggttagggcgattaggcggggaaatagggagagggtcgggtttcgcggggtagttggggtcggggttcgtcgatttgggcgggggcggggggcggggggggtgcggttcgggcggggtcggtggggcgggaggcgtggtcggcggggggagtgggggcggtttttttcggtatatgcgtatcgtagcgggtcgcgcgttttaaggagtggtattttttaaaagtgtagtcggagattagtttatagtcgtttgtatttgtatttagcgttaggtttcgttagttttagttgcgcgcgttttttagtttcgtattcgttcggtttaggttaagttagtttttattatgtcggttaaaggaggtattaagtgtattaaatatttgttgttcggatttaattttattttttgggtgagtgagcgcgattgtcgcgcgttttttttagggtttatttgttcgcgggtttcggatattggtcgcggtcgcgagtgtcggtagttggtattgttcgtatcgggtaggtatcgggcgggaagagagagcgttttgcggttgttagttggttttaaggtcgggtttagagtcgggcgggacggtcgcgacgggcgtattcgggtgggggtttattatcgtttagtcggcgtggggagtcgggtttttttgagatgaggcgtgcgggagggttttgagtattttagttcgtttaggatttgagttggggtgtgtgtttgtttttagtttaagttttttcgagtgttagagaggaaggtagggagaagcggagtatttttttttgggttaaggttaaggaggattgtggtgagtagtatggtttgtgatcgggtggggttttttaggtagtagggggcgttaggaagggagggtgcgggtacggcgagagtttagttaagagcggtttttatttttacgtaggagcggtaggggtgtttcggtcgcgggttcggtttcgggatttagtttttgagagtcgggggtttttttatttttgaggaggaatttcgtaggttttcgtttttttagattttgattttgagttatcgtgagagcgtcgaattttttggtagttttttgaaagattagtttgttttgattttttttaaggacgataagtatttttattggagagaatttagagttcgggagaggagggggtagatatttatttgcgtttttagtgggatgagttttgtgtgtgtattttcgggagagattaggtgttagttagttgttcgtttaggagagttttggttttgttttttttttttttcgttagtttaggcggtttatttaaggttaggtagggcgtagagcggacgtttatttggagaggttagcggggttaggagttttagagatatttgttgtaggttatttagtttttataaatggg

SEQ ID NO: 44 - DNA, 6117 bp, Artificial Sequence
  chemically treated genomic DNA (Homo sapiens)
tttatttgtagaggttgagtggtttgtagtaggtgtttttggagtttttggtttcgttggtttttttagatgaacgttcgttttgcgttttgtttggttttgggtgggtcgtttgggttggcggggaggggagagggtaaggttaaggtttttttgggcgggtagttggttggtatttgatttttttcggaaatgtatatataggatttattttattagaggcgtagataggtatttgtttttttttttttcgaattttgagttttttttagtgaagatatttatcgtttttgaaagaaattaagataagttagttttttagggagttattagggagttcggcgtttttacggtggtttagaattaaagtttgagggaacgggggtttgcgaggtttttttttaagggtggaggggttttcgatttttagggattgggtttcggggtcggattcgcggtcgaggtatttttgtcgtttttgcgtaaaagtgagagtcgtttttggttgagttttcgtcgtgttcgtattttttttttttggcgttttttattatttgggagattttattcggttataagttatattgtttattatagttttttttggttttggtttaaagaggggtgtttcgtttttttttgtttttttttttggtattcggagggatttgagttgggagtagatatatattttagtttaaattttaggcgagttaaagtgtttaggattttttcgtacgttttattttaagagggttcggttttttacgtcggttgggcggtgatgagtttttattcgaatgcgttcgtcgcggtcgtttcgttcggttttggattcggttttggagttagttggtagtcgtagggcgtttttttttttcgttcggtgtttgttcggtgcgggtagtgttagttgtcggtattcgcggtcgcggttagtgttcggggttcgcgaataggtgggttttgagaggagcgcgcggtagtcgcgtttatttatttagaagatgaagttaaattcgaatagtaggtatttgatgtatttggtgttttttttgatcggtatggtgagggttaatttagtttgggtcgaacgggtgcgggattggggggcgcgcgtagttgggattggcgggatttggcgttggatatagatgtaggcggttgtaggttggttttcggttgtatttttaaaaagtgttattttttagggcgcgcgattcgttgcggtgcgtatgtgtcgggaaaagtcgtttttatttttttcgtcggttacgtttttcgttttatcggtttcgttcgggtcgtatttttttcgtttttcgttttcgtttaggtcggcgagtttcggttttagttgtttcgcggagttcgattttttttttgttttttcgtttagtcgttttaatttttattcgttatttattttttttttaagtcgttttggggtttttgtaggtagttattttttgttatttttatcgcggatttacgtggaggtttcgttttttcggttttttcgcgtttggtttgggcgtcggatcgggcgttttgttttgggagattttttttcgggtcgttagggttaaaggttttttggttaaggtttgttgttagagtgaggggtttttttgttttgcgaggatttaaagggaagtcgtttggtttaatttcgttttcgtttgtttttttgtaaattttcgttcgttgattatattttttattgggtatagtatgtggggtaggaggaattagaagcgcgtagtttgggtgggatgatagatgggaggtttttggaagtaattagtaaatatttattatcgaataataatatagttgagggttgggtagtttttaagcgttttttgtatttgaggtttagttgttttagagggaaaaagggtttgtagacggtttttgttttttttttatttttttattttatttttttttttgcgtttttggatttgttcgttgttgttttgaattgttttagatgtcgagttcggagcgttttttttgagtttataaattttttgtagttttttagatttaaggatttaagtcgaaatttttcgttttgtttttaaggttttgtatagagtattgatttgatttttttcggatttagagtttattttattcgttggtcggtatgcgttttggttggttggtttttttttaacgttatttgtaggaattttgtgggtttttaaatattttttttttgattttttggagtggacgaggagagttatttttttttgaagttttcgaatttttttgtattatttttaaaatgaagttttttttattgttttttatgattataaaagtaagatatagttattatagaaataatcgaaatattaagaagtgaaaggaatagattttaaaattttgtttattagaaatagttattgttagtatattgttgttatttgtttgtttattattagtagatttgttttattggtttaaaaatattttttagtatttattagggtattttattaggggtaggagttgaaaaatatggattagtttttgtttttgtttagggattagtgtgggaggagataggtagttagataatggtttgagggtgataggtgtagttacggggagaggtttgggggttaagaggttaaggagaggtttttgatttagattgggagatgatgttgtagaattatagggaaagttgtcgttaagggagaattttgggtaaaggttggggtaggggttgttcgggttttgggttggagtttggagttacggggtagtttgtgggaaggtgagaaagagttttgtgtttttggattttgtattttgagtattaggggttatcgaaaggtttaagtaggggaatggttggatttgttgtgtttttagaggttttttgtttgtgttttaggtagttgggtgggggaaggtcggaggggtaggtaggaagttttttgaggattaggattattgttggtatttttagtttttggtttagtgttttacgggattgtatggaatatggagatgttgtatttggggagacgtaattaggtaatatgaggggagtagtggtagatgaaagttgagttgaggattaggtgtaaatttgttaggaggttgtggagtagtttaggtgagagaagaatgaatgaaggcggggtaatgggataaagtttagagaaggtagggtaaaattttatgaggtgttaggtcgggaaggggagggagagattagaggtagagtagtagaagttagtaataagtaggggtatagggtatatttttacgttaatttgagttcgagaggttttttagagtaggggatattgtagtagttgatttgatttgggaaggtggagttagtagttaatgcggaggagggaattttaagagggaattggatatgtaaagatatagaagcgggtagttggttgtattggggaaataatcgatagtggtatatggggaggaaggaggataaggaaggagaggtagggtttaaattgagtttaatgttaagaggataagtagaggaattttggtgatgtttgattttatatattttaattagtgtttaggatgattttagtataggggaggagtgtgaagtattttggagggtgggaaggaggtcggaaaatagttagtgttttattgtgtttttttgggtttgcgtttatttattttgggagataggttttaggaaaagaaagattttattgtatttttttttttttttaagttaataagtattggtgggaggagtttagtaaatatttaagtttataatagaaattatttattagggtaaacgtgagtgttgatagaggaaatttatagggaggttttagaatttgtttgttatagaagcgttgtagaaacgttgtttgttgtttttatttttattattgtttatattgaagaaagaattggggttagtttatatagtttagtgttatattcgtataattaaggtattttttttatgtgatgagagtattgggtttgaagtgagggggtttgagttttatttttggttttgattttttggtttatgttaggtaggtagttttttttttgggttttagtttttttatttgtataagagtattgtgaaaggaaaataaattttaggattttaaaattaataagttaaaggaaaaaattaagttgggaattgttataggtaaatttgttttttatttttaaataagatagttataaagattttttaaaaagttatgtatttttcggtcgggcgtagtggtttacgtttgtaattttagtattttgggaggttaaggtgggcggattacgaggtgaggagatcgagattattttggttaatatagtgaaatcgtatttttattaaaaatataaaaattagttaggtatggtggcgtatatttataattttagttattcgggaggtagaggtaggagaattttttgaattagggagttggaggttgtagtgagtcgagatcgcgttatagtattttagtttggcgatagagtgagatttcgttttaaaaagaaaaaataaaaaaagttatgtattttttgttgggcgttgtgatttatatttgtgatttaagtattttaggaggtcgacgcgggaggattatgaggttaggagattaagattattttggttaatacggtgaaatttcgtttttattaaaaatataaaaaaattagtcgggcgtggcggcgggcgtttgtagttttagttatttaggaggttgaggtaggagaatggcgtgaattcgggaggtagagtttgtagtgagtcgagatcgcgttattgttttttagtttgggggatatagttagatttcgttttaaaaaaaaaaaaaaaaaaaaaagtagttatgtattttttttataatttgtttatgaggaaatttttggtggattttatgatatttgttttaaaatagttttgttgaattttattatgataatgtaaattgatagtatatttttataggtatagaaaaaaggatagaatttaaagttatttttttgtttatttgagataaatgtatatttgattgttttttttaatgtaaaaatgaagattcgttgtgttagataaggtataagtgatttatttttttatttttttttgttatgtaaattgtgtatttagtgagaggatgattagtgatttaaaagaatgtaatcgtttgttttttatttatttatattttaaaaaaattttttttttttttttttattagtcgttttttaaatattgaagtttttaaaattatttttgtagaaggtatagatttgttttttgggcgtttatttgtaattttggtaaaataaattttttaaattgattgagatttgttttagatattttttggtttatagtattttggattaggaggtgttttttattttttttgatattttgtgttataataaatttttgggttaaagtgtatttgttatagatagttagtgttataggtaattaggaaggtgagcgatggaaaaattatgttttgttttaatcggaagaggaaaatatgggtaagtttttgagttagaaattatatggaagtagttaggttttttaggttttgtggtgttggagtgggaaagttttttttttttttttttaaggcgttttgtttttgggaaagaaattttagtttaggtttagggtttattttggtttttgtgttttttttggtggtaagatttgaatacgtagaggttaggtgatttaatgagtcgttatatttatgttttaggtttttttagttgtgggtaatggttttgtaaggtaataggtaggattttcgtttttataggttattaaggtttttttagttattatattagtggttattttgatttattttttttatttttagaagttttttttttgtttttttttttaagtttaaatatattattttatgaagtttttttggagtattttagttttttttttcgtggattattttgagtttcgtatgtgtgattttttggttattattatttttttttatgtgtttattttttggtagtgagtttttcgagggtgtatttgtatttgattaatttttgtgttttttttagttttcg

SEQ ID NO: 45 - DNA, 11996 bp, Artificial Sequence
  chemically treated genomic DNA (Homo sapiens)
agaagttttgattattttatagatcgggaaattgaggttcggaaaggttatattatttgtttgagattatatagtttaaaagggagttttgggcgtggtggtttatgtttgtaattttagtatttttggaggttgaggagggtggattatttgaggttaggagttcgagattagtttggttaatatggggaaatttcgtttttattaaaaatataaaaaaattagtttggtgcggtggtaggcgtttgtaattttagtttatttaggaggttgaggtaggagaatcgtttgaattcgggaggcggaggttgtagtgaattaagatcgcgttattgtattttagtttgggtaataagagcgaaattttatttaaaaaaaaaaaaaaaaaagtaaaaaaagttagttaggtatggcggtacgtgtttgtatttttagttatttgggaggttgaggcgggagggtggtatgagtttaggaggtgtagtttgttttaagttataattgtgttattgagttttagtttgggtaatagagattttgtttttaaaataataataataaattaggttgggcgtggtggtttacgtttgtaattttaatagtttgggaggtcgaggtagtcggattatttgaggtcgggagttcgagattagtttgattaatatggagaaattttatttttattaaaaatataaaaaaaaaaaaaaaaaaaagaattagtcgggtgcggtgttagatgtttgtaattttagtttattcgggaggttgaggtaggagaattatttgaatttaggaggtggagggtgtagtgagtcgagatcgtattattggattttagtttgggtaataagagtgaaatttcgttttaaaaaaaattatattaatatattataattatattataataattattatattatataatataattattattattatattatataatataattattataattatattataataattattatattatataatataattattattatattatataatatattataatgttatatattatatattataattattatacgattataataattattagattatataattatacgattataatttttagattatataattattattatatgattataatttttagattatataataattatattatataataattattatattataattatattatataataattattatatataataattttattatataattattattatattataataattatataatataattattttatattataataattatattatataattattattatattataataattatattatataattattattatattataataattattattgttggttggataattttgggttgttttttttttttttttttttttttttgagatggagttttgttttgttgttcgggttggagtgtagtggcgcgattttacgattttacgattttagtttatagtaatttacgttttttgggtttaagtaatttttttgttttagttgtttaagtagttgggattataggtaattttgggttatttttgagttgagtaatttggggttagtggtttaaaacgtttaggtgttagttttttttttgataaatgaggattatgttttcgttttttattattgtagaataaaagttatgaggttgtttagaagttgtaaaataggttagtaggattgagattttaggataaagagaaagtggagaaatataggtagacgtttcggtagggattagattagcgaggttgaaggaggttttttttagttgggcggtagcggagtggagtggtaggagtattattaatttgtatggtttattatatagggttttatttagtataggttttgtgttggtgttttgtagagaaaaagataaaagttatttagggggttgatagtttaatgcggttcgagggtagattgttgtaagggaagaagggagatggtgagaagtattggagagatttaagaaagtcgttaggaatggtgatttacgtttgtaattttaacgttttgggaggttgaggcgcgtggattatttgaggttaggagttcgagattagtttggttaatatgatgaaattttatttttattaaaaatataaaaaattatttaggtatggtggtgtatgtttgtaattttagttgtttgggaggttgaggtaggagaatcgtttgaatttggaaggcggaggttgtagtgagtcgagatcgtgttattgtattttagtttgggttacggagagattttgttttaaaaaataataataatgaaaataaataaataaaaattaaaaaatgaggatttggttgtgtttatttggaattttagttattcgggaggttgaggtgggaggatcgttggagtttagtagtttgaggttggaatgagttatgatcgtgttattgtattttagtttgggtaatagtagattttatttttaatataaagtaaaataaaataaaataaaataaaaaagtgtcgatgattattatgaaggggtgtagggataatttttggtattaggaagcgttttttgtttttttgagattttgtagatattagttgtttgacgtgtttatttgatttgtagagaagggacgttgagttttggggttttagttggagtttttgattttttgagaaaaaaagggtaaaatttttttagagttggtttggttttttttttttttagtttttgttggtgtttattttttttttttatagtttaggttatttttataggagtttaggataggaaggggtaaattttaggattggggatgtttgattatttttaggataatagttttgtgattttagtgattagtgattttttttttttatcgttgtaatttttttttttgaataattgaattatattttgtttagtatttattatttttgtattttgaatttatttatgtaataaggagatttgatttcggtatttttattgaaaaattttttttattgttttaaatagtagggaaatttaaaaataaatgtgaatataaggaatttaaaattaagtttttgaattttggttggatatagacgtttgttaagttttagggttacggaggcgttaaagatatgttagtgtttagtagagatttttttttgggtttattgtagggattttggggttgggttgttcgtttatggatttttttagttgggtaggttatttgtgttttagtttttttttttgttaaatgggaatgataatattattgtagatgttttgaggagtaaatgagttaaaatagattaaaaaaaaaataaatttatgattaggtttggtgtagattaagtgttttataaataatagtatttttttggtagtatagcgagagtttgttttaaaaaaaaaaaaaaaaaaatttaagaaaaaattagttaggcgtgatggtgtatagttgtagttttagttttttaggaggttgaggtaggaggattttttgagttttggagtttgaggttgtagtgagttgtgatggtgttattgtattttagtttgggtgatagagtaagattttttaaaaatatatatagcgtttgtttgtttgtttttagatagttttatttttgttgtttaggtttgagtgtaagggtataattttagtttattataattttcgttttttgggttttattagtttttttgttttagttttttaagtagttgggattataggtatgtgtcgttatattcggttaattttgtatttttagtagagataggtttttttatgttggttaggttgagtttcgaattttcgattttaggtgatttatttattttagatttttaaagtgttgggattataggtgtgagttatcgtatttagttaaaaaatagcgttttaaaaaattatgaggtagtttaagagataagttaattatgtgatttatttagaaaggaaagaatttttttattatatgattttttgttgattaacgaagaggtttttgaaatataagttttttatagggggaaattggtttagaaagattagaaagatttaggaggtttgttttgtgcggtgaagtttttttttttggtatttgtttggtatcggaagagggttttttttttttttttgggtttttatgtggatattgtaatgttttagttttttttttttttttttgtttttgatataggattttattttattatttaagttggagtgtagtggtattattatagtttattgtagttttaaattttttagttcgggtgatttttttcgttttagttttttgagtagtagtagttgggattatagatgtttgttattagtttggattatttatttatttattttgtagaaataagagtttcgttatgttgtttaggttggtgttaaatttttgagtttaagcgatttttttgtttcggttttttagagtgttgagattataggtgcgagtttttgtattcgatttgtttttttatttggaaaatggtagggaaacgttttgttagttgggacgtaggttttgttaattttggtatgttaaagttttgggtatagggcgagttttattagcgtgggcgtttagagttatttttgataagatttttttgcgtttgtttagggaagagttaagtggttttaggtaagatcgtttcgttcggttgttatattttttttttagagtagttagttttaatatagaggttaaagggttcgttagagttatatggtggaaattttagtagagggtttttgaaagtaggttgtattttatttttattgagtgtacgtgtgtgtgtgtgtgtgtgtgtgtgtgtgtgtgtgtgtgtatgtagcgtttttgggtttgtgtttttattgtatttttttgttggtttttagttgtatcgttagtttcggggagggttttgggttagcggttgttcgtttttttttttttataaagttttggtttcgggatagtttgtatagttgtttagtttgtggagacgggatagttttgttttatttatttttttttttgtcgtttttgtcggtagttttaattatgggaggtcgcgtttttttcggtaagtattttggggtttcgttgggaggggcgaggaagttttagcgggattttttggttgcgtttgagaaacgggaggcgtcgttggtgtttgtggggtttgcgatagaggaagttatatggttaagtaggtatttacgggtatacggcgagaggggttggtggtgtttgggtatttttatatttcggtaggaattttagggtgtttttggagtttgttattttgtttggagggatttttaagttttttattggagttagtttggtatttgttttttaagaggggaaattgaggtacgggggaaggaaaggggtaaaaagtgagtgttgggattttgagagtcgttgtgtttaatataacgtatagaaggatatgggcgggggtggggaagttagaagttaggatttttttattgtaaggtatttttaatttgtttttcgtagttttagtagtaggggtagtttttagagattttagtttttgtttttcgtagatttggttggggtttagttgcggatcgaagggattttgtttggttttgggtttgaatttgatttttgttgtgattttttgggattttttttttcgttttatttaaggtgattgtaacggttattagggtagttcgttgtttaagtaacggggtaataaagagagtgaagaaatgatatttggggtaaaaattagaattttttggattatagggatatagtttttttgggttagttttaagtggtaggtgttagtttagtatttcgttttggtttgagagtgagagataagagtttattttgggttttttgggggtatatttgttgggggtagttgttaagatttggttttttaagggttttacgttttggttgtttgtgttattagggttaagttagagagtttttgcgttttattttttttatttataaaatggagtataattcgttttcgttttagattgttttaagggatgagtgagttaggatataaattatttttggtttatagtaagaattaggtaaatagtattttaaaagtgttggttgggtatagtggtttatatttgtaattttagtattttgagaggtcgaggtaggtggattttttgagtttaggattggagattagtttgggtaatatatcgagacgttgtttttattaaaaataaatttttttttttttttttgagataaagtttcgtttttgtcgtttaggttggagtgtaatggtgtaatttcggtttattgtaattttcgttttttgggtttaagcgatttttttgtttcgtttttatttatttcgagtagttgggattataggtgtttgttattatgttcggttagttttttgttttagtttttgtgtttgtatttttagtagagacggggttttattatgatggttaggttggttttaaatttttgattttaggtgatttattcgttttcgttttttaaagtgttgggattataggtatgagttatcgcgtttagttaaaaaaaattttttttaattagtcgggtttggtggtgtgcgtttgtagttttagtggtttaggaggttgaggtgggaggattttttgagtttaggaggttgaagttgtagtgagttgtgtttgtattattgtattttagtttgggtgatagagtaagattttattttaaaaaataaattaataataaggtcgggtgtagtggtttatatttgtaattttagtattttggtaggtttaggttagtagattattagaggttaggagttcgagattagtttggttaatatggtgaaattttgtttttattaaaaatataaaaattatttgggtgtggtggcgggcgtttgtaattttagttattcgggagtttgaggtaggagagttttttgaatttgggaggtggaggttgtagtgagttgagattacgttattgtattttagtttgggtgatagtgagattttgttttaaaataaatgaataaataataaattatgatgattattaaattttggtaagatattagtgggtttggggaattgtttcggggtttttaggaggaagtttaaagaaggggtgattgttttattattttttattttaggattttaatgtaggaaattgattatttagggtttagtttagagaatgtaaattagaaggaatttaaattagaatagtagtttttttttcggtttttgtttgggtaatttttaaggttttagatggaggtagttgggttttgtagttttacggtgggagtagagaatttagtttagtttatgtagaggggatggggtataaaggaattttgtttagggttttgaggattttaattttttaatttttttttttttaattttttttgtttattggattttttttgatttttttttgggttttaagttttagtttttttatttgtagaatgggtattaatatagtttttgttttttagagtggttttgagttttaaaggagttatttggggttttgggagttagagatgaatttgtttagattttgttttgttaggggaggttattttgtggtttgttttgtaaagaggaattgggttttggtcgagggaggaattagttaagttttgtggttagagaggaggaagaggggaattttgatagaagtggggagtacgggtttgggttggggggtttcggttttggtttaatttagttggaaggagtgtggaggtgggagtggggatttttgttttttatttatttaaggggtattaaatttgaatatagtggttgagtggttcggggatttttaatttgtattttaaatattcgttttttgaagttgtgtttataatagattttaaaatttttttggaagtttttttagggttgaattggggtaaatgagtggtgagttatttttttttttaggtttaggaagtgatttatgtttagtcgttgttttggtttttatttttttgttcgatatttttttttaggtttttttggattattggggtttttagtatttttagatcggtagggattggacgtttttttttagttcgttttaggttttatttgtcgtttatattttaacgtttttcgtttttttgttttttttttttgtttttatttattttttttttttatggtttttttttttttttattgtttatttttttgtttttttgttttttttgttttatttttttttgtttttttttttgttttttatgggttttttgtttttttttttatttttttttattattatgtaatttttgtttttttgtttgtttttattttttcgtgtttttgttttttttgttttatatttttttagttgtttttttttttttttttgtttttttttttttttttagtttgtttttttttttttttttgttttcgtttttgtttttttatttttttgtttttttttttttttgtttttttttttttttttttttttttttttttgagatttttgtttttttttttttttttttttttttgagagttttgttttgttgtttaggttggcgtgtagtggcgggattttagtttattgtaatttttgttttttgtgtttaagcgatttttttgtttttattttttaaatagttgggattataggcgtgtgttattatgttcggttaattttttgtatttttagtagagatggggttttattatgttggttaggttggttttatatttttggttttaggtgatttatttgtttcggttttttaaagtgttgggattataggcgtgaattattaagtatagttttttattttttgtttttttgtttttttgtgtttttgtttttttttttgtgtttttttttttttttgattttttttttttttttgtttgtttttttttttttttaatttttattttttttttatttttgtttttttgtttttatttttttggtgaatagtaaggagatttttaggtttttatttttgaattttttggtgatttgaggagggttttttagaatatgttttgggagggggaattttttgagtgttgggaatcgttattttacgtgtattttaataggcggttatagcgtttttttgtgggaggggggttcgggggtgaaatattattattgggttttaggatagatcgttagggttagtggtagttgtgggtgtggtgtgtgtgtatttgtgtttttgaggaagcgtggaggtttagggtattttagagtttgggtgatttaatatcgttatttttttttttttttttttgagacggagttttgttttgttatttaggttggagtgtagtggcgtgattttggtttgttgtaattttgtttttttagtttaagcgatttttaagttttagttttttaagtagttgggataataggtatttattattacgtttagttaattttttgtatttttagtagagagggggttttattatattaggtaggttggtttcgaattttcgattttaagtgatttattcgtttcggttttttaaagtgttgggattataggtatgagttattgtgtttgattacgtttttatttttatttaaagaaatgaagatggtaggtagggtttggcggtttgtgttagtattttgggaggttaaggtaggtggattacgaggttaggagatcgaaattattttggttaatatggtgaaattttttttttattaaaaatataaaaagttagttaggcgtggtggtgggcgttagtagttttagttattttggaggttgaggtaggagaatggcgtgaattcgggaggtggagtttgtagtgagtagagattatattattgtattttattttgggtaatagagtaagattttattttaaaaaaaaaaaaaaaaaaaaaaaaaagagaggtcgggcgcggtggtttacgtttgtaattttagtattttgggaggttgaggcgggcggattatgaggttaggagattaagattattattttggttaatatggtgaaattttgtttttattaaaaatataaaaaaataagttgggcgtggtggcgggagtttgtggttttagttattcgagaggttgagataggagaatggtgtgaattcgggaggcggagtttgtagtgagttaagtttgtattattgtattttagtttgggcgatagagtaagatttcgttttaaaaaaaaaaaaaaaaaaaaagagaaatgaagatggtaggttgggtacggtggtttacgtttgtaattttagtatttttggaggttaaggcgggaggattatttgaggtcgggagtttaagattagtttggttaatatggtgaaatttcgtttttataaaaatataaaaaaattagtcgggtttggtggcgggtgtttgtaattttagatattttggagattgaggtagaggaattgtttgaattcgggaggtggaggttgtagtgagttaggatcgtgttatcgtattttagtttgggcgatagagagagattttgttttagaaaaaaaataaaataaataaataaataaaagaagaagaaatgaagatggtagtaaatgtttaggtatatcggatagtagttatgtggtttatttttatatatattatattggggagtgggcgttattatttttattttatagagggaaattgaggtagagaggtttattgtttgggatttgaattggggatgtttggtttttgtttgtttttttagttattttttatatattttaggttagaagagtagtagttggagttgagatttttattaggtttatggtttttttttatttagtttttgaaattttatttttaagtcgagttcgggaggttgaggcggggaggatcgtttgaggttaggagtttaagattagtttgggtaatagagtaagattttgtttgtaaaataattttttgaattatttttaggtcggttatagtggtttatgtttgtaattttagtattttgggaggtcgaggtgggtggattacgaggttaggagatcgagattatattggttaatatagtgaaattttatttttattaaaaatataaaaaattagtcgggtgtggtggtggacgtttgtagttttagttattcgggaggttgaggtaggagaatggtatgaatttaggaagcggagtttgtagtgagttgagattatgttattgtattttagtttgggtgatagagtgagatttcgttttaaaaaaaaaaattatttttaattttttggtttggtatgataaattattttattttaaaaattttgagttaggaaatgtggtttacgtttgtaattttagtattttgggaggttaagataggtagattatttgaggttaggagttcgagattagtttggttaatatggtgaaattttgtttttagtaaaaatataaaaaattagtcgggtgtggtggtagatttttgtaattttagttatttaggaggttgaagtaggagaattatttgaatttaggaggtagagattgtagtgagttaagattatagtattgtattttagtttgggcgatagagtaagattttgttttaaaaagaaaaaaaaatttagtgtatatttgtggttttagttatttgggaggttgaggtaggaggattttttgagtttaggaattggaggttgtagtgagatatgattgtattattgtattttagtttgggtgattaagtaggagtttgtgttaaaaaaaaaataaaaataaaaaaattcgtttttatgggaatagggtgatagattttttggttttgagtatttgagtgggatatgatatttgtttattttgaacgatcgttaggatttgagtttgagaggggttagtattttttttttataaagtgtattatttttacgtttttttttttattttgggattttttttgatttttttttttttttttgttgtagt

SEQ ID NO: 46 - DNA, 11996 bp, Artificial Sequence
  chemically treated genomic DNA (Homo sapiens)
gttgtaatagagaaaggaaagggggttagaggggattttagggtgggaaaggaggcgtaagggtgatgtattttgtgggaggaggatgttgattttttttaggtttagattttgacggtcgtttagagtgagtagatgttatgttttatttagatgtttaaagttaaagagtttgttattttgtttttataggggcgggtttttttgtttttgttttttttttgatataggtttttgtttggttatttaggttggagtgtagtggtgtaattatattttattgtagtttttaatttttaggtttaagagatttttttgttttagttttttaagtagttgggattataggtgtgtattaaatttttttttttttttgagatagagttttgttttgtcgtttaggttgaagtgtaatgttgtgattttggtttattgtaatttttattttttgggtttaagtgatttttttgttttagttttttgagtagttgggattataggagtttgttattatattcggttaattttttgtatttttattagagatagggttttattatattggttaggttggtttcgaatttttgattttaggtgatttgtttgttttggttttttaaagtgttgggattataggcgtgagttatattttttgatttaaaatttttaaaataaaataatttattatgttaggttaaaaaattaaaaataatttttttttttgaaacggagttttattttgttatttaggttggagtgtagtggtatgattttagtttattgtaagtttcgttttttgggtttatgttatttttttgttttagtttttcgagtagttgggattataggcgtttattattatattcggttaattttttgtatttttagtagagatggggttttattgtgttagttagtatggtttcgattttttgatttcgtgatttatttatttcggttttttaaagtgttgggattataggtatgagttattgtggtcggtttaaaaataatttaaaaaattattttatagatagagttttgttttgttgtttaggttgattttgaatttttggttttaagcgatttttttcgttttagtttttcgagttcggtttgagggtggagttttaggaattgagtagggaagggttatgagtttggtgggggttttagttttagttgttgtttttttgatttggggtgtgtggggagtggttaagaaaatagataggagttaggtatttttagtttaaattttagatagtgggtttttttgttttagtttttttttgtagaatagggatgatggcgtttattttttagtgtagtgtgtgtgggagtaaattatatgattgttgttcggtgtgtttgagtatttattgttatttttattttttttttttttatttatttatttattttattttttttttgagatagagtttttttttgtcgtttaggttggagtgcgatggtacgattttggtttattgtaatttttatttttcgggtttaagtaatttttttgttttagtttttagagtatttgggattataggtattcgttattaagttcggttgatttttttgtatttttgtagagacggggttttattatgttggttaggttggttttgaattttcggttttaagtgattttttcgttttggtttttaaaagtgttgggattataggcgtgagttatcgtgtttagtttgttatttttatttttttttttttttttttttttttttgagacggagttttgttttgtcgtttaggttggagtgtagtggtgtaaatttggtttattgtaagtttcgtttttcgggtttatattatttttttgttttagtttttcgagtagttgggattataggttttcgttattacgtttagtttatttttttgtatttttagtagagataaggttttattatgttagttaggatggtagttttgattttttgattttatgattcgttcgttttagttttttaaagtgttggaattataggcgtgagttatcgcgttcggttttttttttttttttttttttttttttttttgagatggagttttgttttgttgtttaggatgaagtgtagtggtgtgatttttgtttattgtaagttttatttttcgggtttacgttatttttttgttttagtttttagagtagttggaattattggcgtttattattacgtttggttaattttttatatttttagtagagaaggggttttattatgttagttaggatggtttcgattttttgatttcgtgatttatttgttttggttttttaaagtgttggtataagtcgttaggttttgtttgttatttttatttttttaggtaaaaatgaaggcgtggttaggtatagtggtttatgtttgtaattttagtattttgggaggtcgaggcgggtggattatttgagatcgggagttcgagattagtttgtttaatatggtgaaattttttttttattgaaaatataaaaaattagttgggcgtggtggtgggtgtttgttattttagttatttgggagattgaggtttgagaatcgtttgaattaaggaggtagagttgtagtaagttaagattacgttattgtattttagtttgagtgatagagtaagatttcgttttagaaaaaaaaaaaaaaaaatgacggtgttggattatttaggttttgagatgttttggatttttacgtttttttagggatataggtgtatatatattatatttataattgttattggttttggcggtttgttttggaatttagtggtgatattttattttcgggttttttttttataggaagacgttgtagtcgtttgttggggtgtacgtggagtggcggtttttagtatttagggggtttttttttttaaggtatgttttgggggattttttttaggttattaggggatttagagatggggatttagggatttttttgttgtttattagagagatagagataaagaagtaggggtggagagaaaatagagattagagagagagagagatagatagagagagagaaagagttagaaagaaagagagatatagaaagagagatagagatataaagagatagagagatagaaggtggggggttgtgtttggtggtttacgtttgtaattttagtattttgggaggtcgaggtagatggattatttgaggttaggagtgtgagattagtttggttaatatagtgaaattttatttttattaaaaatataaaaaattagtcgggtatggtggtatacgtttgtaattttagttatttgggaggtggaggtaggagaatcgtttgaatatagaaggtagaggttgtagtgagttgagatttcgttattgtacgttagtttgggtaatagagtaagatttttaaaaaaaaaaaaaaaaaaaaaagagtaagagttttaaaaaaaaaaaaaagaaagaaaagaaaagaataaagagagagagagatagagagatagagggatagagacggagatagagaggagaaaggagataagttggagagagagagggagatagagaggagaaagaagatagttagagaaatataagatagaggagatagagatacggagagatagagatagatagagagatagaaattatatggtgatagagagaggtggagagagaaataaggggtttataaagagtagaaggggaaataggaggagatgggatagagagaatagagagatagagagataaatagtgaggaagaaagaaaattatgagaaaggagggtggatggaaatagaggggaagggtaggggaacggagggcgttgggatatgagcggtaggtggggtttggggcgggttgggaggggacgtttagtttttgtcgatttgggaatattggggattttaataatttagggagatttgaaggggggtgtcgggtagagggatggggattaggataacggttgggtatgagttattttttgggtttaagggaaggaatgatttattatttatttgttttaatttaattttggaggggtttttaggggaattttggggtttgttatgagtatagttttagagggcgggtgtttggggtgtagattggaggttttcggattatttagttattgtgtttaaatttagtattttttaggtgggtggaaggtagagatttttatttttatttttatattttttttagttgggttaaattaaggtcgaaattttttagtttaagttcgtattttttatttttgttaggattttttttttttttttttttggttataaggtttggttagtttttttttcggttagaatttagtttttttttgtagaatagattataaaatgattttttttggtaggataggatttaggtagatttatttttaatttttaaagttttaggtaatttttttaaagtttagaattattttaggaggtaggggttgtgttgatgtttattttatagatagagaaattgaggtttggagtttagaaaaggattaggaggaatttaataaatagaagaggttggggaaggaggaattgagggattgaggtttttagggttttgggtagggtttttttgtgttttattttttttgtatgggttgagttgggttttttatttttatcgtgaggttatagggtttagttgtttttatttggggttttggaagttgtttaaatagaagtcgggagagaagttgttgttttggtttgagttttttttggtttgtattttttgggttgagttttaagtagttagttttttgtattgagattttggggtggggggtggtggggtagttattttttttttaggtttttttttaaggatttcgagataattttttagatttattagtgttttattagaatttaataattattataatttattatttatttatttattttgagatagggttttattgttatttaggttggagtgtagtggcgtgattttagtttattgtaatttttattttttaggtttaagagatttttttattttaggttttcgagtagttgggattataggcgttcgttattatatttaggtaatttttgtatttttagtaaagatagagttttattatgttggttaggttggtttcgaatttttgatttttggtgatttgttggtttgggtttattaaagtgttgggattataggtgtgagttattgtattcggttttattattaatttattttttgagataggattttgttttgttatttaggttggagtgtagtggtgtaaatatagtttattgtagttttaattttttgggtttaagggatttttttattttagttttttgagttattaggattataggcgtatattattaagttcgattaattaaaaaaaattttttttggttgggcgcggtggtttatgtttgtaattttagtattttgggaggcggaggcgggtgaattatttgaggttaggagtttgagattagtttggttattatggtgaaatttcgtttttattaaaaatataaatataaaaattaaaataaaaaattagtcgggtatggtggtaggtatttataattttagttattcggggtggatgggggcgaggtaggagaatcgtttgaatttaggaggcggaggttgtagtgagtcgagattgtattattgtattttagtttgagcgataagagcgagattttgttttaaaaaaaaaaaaaaaaatttgtttttggtagagataacgtttcgatgtgttgtttaggttagtttttagttttgggtttaagagatttatttgtttcggttttttaaagtgttgggattgtaggtgtgagttattgtgtttagttaatatttttaaaatgttgtttatttaatttttattgtgaattaggaatagtttgtgttttaatttatttattttttaaaataatttaagacggagacgggttgtgttttattttatagatgagaaaagtgaggcgtagaggttttttgatttggttttggtgatatagatagttagggcgtggaatttttgggaagttaggttttggtaattgtttttaataagtgtgtttttaagaaatttaaggtgggtttttgttttttatttttaagttaaggcggggtgttgagttgatatttgttatttggggttggtttagggaagttgtgtttttgtggtttaggaagttttggtttttgttttaaatgttatttttttattttttttgttgtttcgttgtttaggtaacgagttattttgataatcgttatagttattttgggtggggcgggaaagggagttttaggaagttataataaaaattaaatttaaatttagaattaggtaaagttttttcgattcgtagttgagttttagttaggtttgcggggagtaagaattggggtttttgggggttgtttttgttgttgagattgcgagggataaattgggggtattttgtagtggagaagttttggtttttagtttttttattttcgtttatgtttttttatgcgttatattaagtatagcggtttttagggttttagtatttattttttgtttttttttttttttcgtgttttagtttttttttttagggagtagatgttagattggttttagtagaaagtttgaggatttttttaggtagggtagtaggttttaagagtattttggagtttttgtcggggtgtgggggtgtttaagtattattagtttttttcgtcgtgtgttcgtgagtgtttgtttgattatgtggttttttttatcgtaggttttatagatattagcggcgtttttcgttttttagacgtagttaaggggtttcgttggagttttttcgttttttttagcggggttttaaagtatttatcgagaaagacgcggttttttatggttggagttgtcggtaggagcggtaggggaaagagtgagtgggatagggttgtttcgtttttataggttaggtagttgtgtaggttgtttcgaggttaggattttatgaaggagggggggcggatagtcgttggtttagggtttttttcggaattggcggtgtagttggaagttagtaggaaagtgtaataaaaatatagatttaggggcgttgtatatatatatatatatatatatatatatatatatatatatacgtgtatttagtaagaatgaagtgtaatttgtttttaaaaattttttgttagagtttttattatgtggttttgacgaattttttggtttttgtgttggggttggttgttttgaggggaaggtgtggtagtcgggcggggcggttttgtttggggttatttggtttttttttgggtaggcgtaaaggggttttgttagaaatagttttggacgtttacgttggtgggattcgttttgtgtttagagttttggtatgttagagttggtagagtttgcgttttagttggtagaacgtttttttgttattttttagatgaggaaataggtcgggtgtagaggttcgtatttgtgattttagtattttgggaggtcgaggtaggaggatcgtttgagtttaggagtttgatattagtttgggtaatatggcgaaatttttgtttttataaaataaataaataaataatttaggttggtggtagatatttgtagttttagttattattatttaggaggttgaggcggggagaattattcgagttggggagtttgaggttgtagtgagttatgatggtgttattgtattttagtttgggtgatagagtgagattttgtgttaaaaataaaaagaaagaaagaaaattgaggtattatagtgtttatataaaagtttagggagggagaaggggttttttttcgatgttaggtaggtgttaagaagagaagttttatcgtatagagtagattttttggatttttttgatttttttaagttagtttttttttgtgggaaatttatattttagaggttttttcgttaattaatagagaattatgtgataggagggtttttttttttttggataaattatatgattagtttgttttttgagttattttataattttttaaaacgttattttttggttgggtgcggtggtttatatttgtaattttagtattttgggagtttgaggtgggtggattatttgaggtcgggagttcgagatttagtttgattaatatggagaaatttgtttttattaaaaatataaaattagtcgggtgtggcggtatatgtttgtaattttagttatttgggaggttgaggtaggaggattgatagaatttaggaggcggaggttgtggtgagttgagattgtgtttttgtatttaagtttgggtaataagagtgaaattgtttaaaaataaataaataaacgttatatatatttttaagagattttattttgttatttaggttggagtgtagtggtattattatagtttattgtagttttaaattttagggtttaaaggatttttttgttttagttttttgaggagttgggattgtagttgtgtattattacgtttggttagtttttttttaagtttttttttttttttttttaagataagttttcgttatgttgttaagaaaatgttattatttatagagtatttagtttgtattaggtttggttataagtttgttttttttttaatttattttaatttatttattttttaaaatatttgtaatgatgttgttatttttatttgatagaggaggaaattgaggtataagtgatttatttagttgagaagatttataggcgggtagtttagttttagagtttttataatgagtttaggggaaagtttttattgggtattaatatgtttttagcgttttcgtgattttgaggtttagtaggcgtttgtgtttagttagaatttaaggatttggttttgagttttttatatttatatttatttttaggtttttttattatttggggtaatgaggagggttttttagtgaggatgtcgaaattaagtttttttgttatatgaataaatttaagatgtagaagtgatgaatgttaagtaaaatatagtttaattgtttaaagggggagattgtagcgatggggaaaaaaagttattaattattgaagttatagaattattgttttgggaataattaaatatttttagttttagaatttatttttttttgttttgggtttttgtgggggtggtttgggttgtgggggaggggaatgaatattagtagaagttggaaggagagagggttagattagttttggagggattttgtttttttttttttagaaagttagaaattttagttagaattttagggtttaacgttttttttttgtagattagatgggtacgttagatagttggtgtttgtagaattttagggaggtaggaggcgttttttgatgttagggattgtttttatatttttttatagtgattatcgatatttttttattttattttattttattttattttatgttagagatagagtttgttgttgtttaggttggagtgtaatggtacgattatagtttattttagttttaaattgttgggttttagcgatttttttattttagtttttcgagtagttgggattttaggtgagtataattaggtttttattttttaatttttatttatttatttttattattattattttttgagatagagttttttcgtagtttaggttggagtgtagtggtacgatttcggtttattgtagttttcgttttttagatttaagcgatttttttgttttagttttttaagtagttggggttataggtatgtattattatatttggatagttttttgtatttttagtagagatgaagttttattatgttggttaggttggtttcgaatttttgattttaaatgatttacgcgttttagttttttaaagcgttgggattataggcgtgagttattatttttggcggtttttttgagtttttttaatattttttattattttttttttttttttgtaataatttgttttcgagtcgtattaggttgttagttttttgagtgatttttgtttttttttttgtagagtattagtatagagtttgtgttgagtggggttttatatggtaaattatgtaaattagtagtatttttgttattttatttcgttgtcgtttagttaaaggaagttttttttagtttcgttgatttggtttttgtcggggcgtttgtttatgtttttttattttttttttgttttgaagttttagttttgttgatttattttgtagtttttggataattttatgatttttgttttgtaatgatgaggggcgggaatatggtttttatttgttaaaagggaaattggtatttgggcgttttgagttattggttttaggttgtttagtttagaagtaatttaagattgtttgtaattttagttgtttgggtagttgaggtaggagaattgtttgagtttaggagacgtagattgttgtgagttgagatcgtgagatcgtgaggtcgcgttattgtattttagttcgggtaatagagtaagattttattttaaaaaaaagaaaaaaaaaaaaagaagtaatttaagattatttaattaataataataattattatagtataataataattatataatataattattatagtataataataattatataatataattattatagtataaaataattatattatataattattatagtatgataataattatataatagaattattatgtataataattattatataatataattatagtataataattattatataatataattattatataatttaagaattatagttatataataataattatataatttaagaattataatcgtataattatataatttaataattattataatcgtataataattataatatataatatgtaatattataatatattatataatatagtaataattatattatataatataataattattataatataattataataattatattatataatataataataataattatattatataatataataattattataatataattataatatattagtataattttttttgagacggagttttatttttattgtttaggttggagtttaatggtgcgatttcgatttattgtattttttattttttgggtttaagtgatttttttgttttagtttttcgagtaagttgggattataggtatttgatatcgtattcggttaatttttttttttttttttttttttgtatttttagtagagatgggatttttttatgttagttagattggtttcgaattttcgattttaggtgattcgattgtttcggttttttaaattgttgggattataggcgtgagttattacgtttagtttaatttattattattattttagagatagggtttttgttgtttaggttggaatttagtggtataattatggtttgaggtagattgtattttttggatttatgttattttttcgttttagttttttaagtagttgggaatataggtacgtgtcgttatgtttggttaattttttttatttttttttttttttttttagatggagtttcgtttttgttgtttaggttggagtgtagtggcgcgattttggtttattgtaattttcgtttttcgggtttaagcgatttttttgttttagttttttgagtaagttgggattataggcgtttgttatcgtattaggttaatttttttgtatttttgatagagacggggtttttttatgttggttaggttggtttcgaatttttgattttaggtgatttattttttttagtttttaaaagtattgggattataggtataagttattacgtttagagtttttttttgggttgtgtggttttaggtaggtgatgtggttttttcgggttttagtttttcgatttgtgaaatggttagaattttt

SEQ ID NO: 47 - DNA, 18817 bp, Artificial Sequence
  chemically treated genomic DNA (Homo sapiens)
tttaagattaaataaaaagtttagttgtttgagaaaaaaatgtttgagggaagatgagtatgtttatgtttattagatttagtttgtatgtttaatattagatcgattgtattattattttagatatttttgtagaaatgggttttatatggtggggtaattaattttaatttagaataggttttgttgaagaatatttattggaggataaagtaatgattttttaagttagtgttttttagaagggtttatgtaattatttgtattagaaatttagagtgttagttaggtatggtggtttatatttgtaatattagtattttgggagatcgaggtaggagaattatttgagtttaggagtttaagagtagtttgagtaatatagaatttatttttataaaaaattttaaaattagttggtgtggtggtatttgtttgtagttttagttattttggaggttgaggtaggaggattatttacgtttaggaagtcgaggttgtagtgagttatgattatatgttgtagtttagtttgggtaatagagtaagggatttagggatatattttgaattaggattttatagtgtaagttttagttttagtgaattttagtttggaaagatttggaaggtatttgtttaatgtataattgatgatgtgaatatttattagttattttatttatgagattttttagttattttatggtatgcgtagttggagttagattgagggtttcgtttgttgggtagttgtttggagttagtatttatagatgaagttaaaaatttttttggaataaataaagtataaagtgggtttatttttgttagagtagatagtggggaagaaaatttttattaattttaaattattttttttaaatattttttagaatatcgtaaggtggttgttagttaagatttttaaatagtattatgtatgatttagtgttttttatttagaattagtgatttattttgttatttaagttttaaattttgtgataatttttttaagtgttttggtttggaaaattgttaaaaaaaaaaaatttaataatagagaagtttttaaataaaaattttaaatttaaatttagaagtaagtataggttaggcgtagtgttttatatttgtatttttagtattttaagaggttgaggtgggtagattttagattttaggagttggagtttagtttggatggatgaaattttatttttataaaaaaaatgggatatggtggtgtgtgtttgtagttttagttatttgggaggtttaggtgggaggatggtttgagtttgaagggttaaggttgcggtgagtcgagatcgtattattgtattttagtttgttagtttgtgatagagcgagattttgtttttaaaaaagtaagagttatatggaagtaagatttgttttgtttaaatttattagaaaatggattttgttttggttagtaaaagtagttaagaaagattttgttttagtttaaaataatgattagtagaaaattagttttattttattttattaaataaatgtggaataaaaattgtgaattttaggttttagggggtttaaaattatttgtttttttgggtttttattggttttggttgagtttgtaggtaattatgattatttagaattattgaattaaataattgaatggagttgagttttaagaagtatttattgagtattaattgaagataaagtttttgttattattaagttaatagagtaagatagatattaagtaattaaaatattattttatatttttgttaggtgagggttgtgtgttgatggatttatgataaaatattttgaatgtgtagtatgtaatatataaagaatataaaatgtaagtatttgaaaaattgagaaatttattatttatagattttattttgagttttaaagaataaaaataggttaggagtagtggtttatgtttgtaattttagtattttgggaggttaaggtaggtagattatttgaggttaggagtttaagattagattggttaatatggttaaatttcgtttttattaaaaatataaaaaattagtcgggtgtggtggtgggtatttgtaattttagttatatgggaggttgaggtaggagaattatttgaaattgggaggcggaggttgtagtgagttgagattgtgttattgtattttagttttggggatattaagattttattttaaaaaataaataaaataaaataaaaaagaatataaatattagaaatgtaatatgttttgatttttaggaataattttaagtttttataatttttttgtttgggaggttatttagatttttttataaatgtttataaattaattatttatttatggatatttgtattttttagggataatattggaggaatgtttaaaatattatagataaaagcgttgaaatgtttttattattatgaagttgtgagttgaaagtattagtttaagtttttttatttgtttagttttgtttttttttttttttttttttttgagatgtagttttgttttgtcggttaggttggagtgtagtggtgtaatttcggtttaatgtaatttttattttttaggtttaaatgatttttttgagttagttttttgagtagttgggattataggtatttgttattatatttggttaatttttgtatttttagtagagatgaggttttattatgttggataggttggttttaaatttttgattttaggtaatttgtttgttttagttttttaaagtgttgggattataggtgtgagttattgcgtttggtttttagttgtttttattttataaattatattttttttgttttggaaaattaaattagtaatatttattaattatattttttttatttttattattagtaagtttattgaattagtaatgttttattttttatgaaaatgagtttttaaaatgtagtggtggttatttgaaacgtgtatatttttaatatttggatttaatttggaaggatgtttaaattatgtaaggaatatatgaatagtttttagaattttgttaatttggtattttatagtatagaaatagtttttgtaatttagaaatgtaataattatttgttaatttttttgatgggtggtttaggtatttttagtgtttaattaatttaattttttgagttggaagttgggggttagagatagtaagtgatgtatagaggaattttatttcggaatttggttattttttaataggaatgggtttatgtagggatttttgtttttggatttttttttttttttttttttttttttttattcgtataaagttggaaggaaaaaaatttggtaaagtttatagttgtagtgaataggatgggatttgaattaaaatagggttgtagtttcgattttgtagttaaaggttgtgtgatttaaataaaaaataaaatttttttgtgtttttattttttgtttataaattggaatttattttgtagatatgttaaatgaaaaaatagaattttaattgatatattaatatgttacgaatattgttattgttgttgaaaaataatgattataaatgatatatatgtattttatttttgaaaaaaaaaaatttataaatttaaaagtattttattattttaaaatttttaaagaagatttaaatttttttatgaataatgttgtgtgatgagatgtttgtttttgattttaggaattgaaatatgtggtaagtggaagcgatttgattttgtagaataagtatattttatttagttaatgggagggtagaggtgtgaagaatgtgagaagtgtttagttttaataattttatttttttaaatgagtgatgttggttgtgggataaagtaagaagggtttttgttgaatttattagtttattaaggatgttaatagttggtatgtaattagatggttttatttgtagggtttttaggataaatgaggtttatttttatagtggtttagagtatttatgaaatttttttatgaaatttggaaaggagggagtttttttagagagtgggttgggtttttttgttttttttttgttagatgtatatttggagaggaatggaaaatataattttagtttaggagaagttaagaaatgaatatgagaaggtttatagaaatagggttaagtgtaatatattagatatagatatgatattgatgtttatttttagtgtggatttttagagtgattaaagtgtggaaattaggaattggtttaaaagaagttttgatttgagaaatttgggggtattggtttttattggttaattaaaaattttattttgattggggaaaaataagttgtttttaggtaaatttattttttgaattgtgggggggaaaaaaggatttggtttgtgtttgggggaaatttgttatcggttgttttttgtagattttggaagggatttttggattttaaaagtaggtatagttatattgtgtttttttttatgttttttgagttatttatgatattttatgtggttggttattaatgaattgtgttattgtttagatatggcgtttttgtttcgttttttgtgtttgagatggaatttatataaatatttgttgattaagttttttgtgttaagtgttgggggtataaaatatggaaagtttttgatgttatgaattttatattttagagatagttggatatataaaaatttttttattttaattttttgtttttttattgatttatttatattgaaaaatgtagtaatttgttttgagatggattagatgtaagttaaattttttttgatataaagttattttttttttggagtaaaagtaatgatattttttatgatatttagtggttttcgaagagtaataaaaaatgttaatggttaatgtttgattgaagttgaagggagaggttgggaggtaaagtagggaagagggagtgttttcgggggagatattttagtcgtagtaagagtttcgattattgaatggaagaaaaggatttttaattattattttgtgatttatagaaaggtaagggttgatatgttttaattgtgttagtaacgtatttattttagaaggataaagtagatggagggggagggtatttaaaaagttgtttgataaatttgttttttgaggtgggttatgtagatgcggagaagggaaatttgttgttggtatgataagttttgtttatggagtataatttttttttgtagtttttttttattggtttatattttataaatttatttgatgaagtggttgtagtgaaattaagtttggtagtggaattaaaggggaaattgagttttttgatgtttaaataagtattatatttattttttgtgatgagtatataaaagtttttggttttaagatgttttagggtttttgtattttagaaattggggttggaattatatttttaaaaagtatgttattttatttattttttagagaatgagatttaatttgggatttttagaattgtttaggatatagtaagggagggaatatgtagagaagaagaaaagtttttttgtaaaagtattagaataagaattgaagatagatagatttgtttttataagtgagagaagaggttgatgtgcgtgttaattagttttttgggttgtttttggttttggtggtggagttattatttgttaatgtgtggttatttttatgttaagttatatatagtttattggtatttttaatggttcgatatttgtttttgttttggttttttatgataggtgattttatagggatagatgttttttgtggtaggggatgttaagtagtagattggaaggatagtgttttttttaatatttttttgtttttatttttttttaaaagtttaaatagtaaatgaggtattatttgaaagaagaagaaaaaatatatgtttagatgaaaggaagatgaatgttatttagtttttattaggaaataaagcgagttttttattgagagagggtttttagtgagttacggggttatatgagtttttagggttggttaaatgggttaggttagttttattattttttaatttgtgggtatagaatagagagttgttattagagatttgtttaattaggtagttgtgagaagtaaattagataagtaggtaaagagtttattatgttgtttggtgtatggtatatatttagtgaatgttagcgttttgttttatgagaaagtttaagtaggtgatttaggatgaattgagaaatttttgttttattttttagaaaaataagaaaaaaattagtgatgttataaaaatagtatttattattatgtaagagaggaattaattttatgtttaggaagtaggatttaaaaatatgagaataataaaattattggttttgttatatatatagtattttaaagttttttttatggtttttatataagtttttgggtgaggtgtaggtggggtattttttgaaatttatttagatgatttttgaaaaaagttattattgtttaaggtgaaggttatattttcggtattttttttttttttatataaaaggtaaaatatggttgggtgtggtgggttatttttgtaattttagtattttgagaagttgaggagggagaatcgtttgtgttggagtttaagattagtttggaaggtttgaatatagggagatttagattgtataagaaaattaaaaattagttaggtatgatggtatttatttatagttttagcgatttgggaggttgaggtgagaggattttttaagtttaggaggttgaggttgtagtgagttatgattgtgttattgtattttagtttgggtgatagagtgagaatttgttttaaaaaaaaaaaaaaaaaaaatttggatgatgtgtaaaatatattttggtagaaattttatttttcgttttattgttaaaaaaaatgtttagaaggatgtgttttttattttttttttatattaatagtaatagttttgaggaggaaagttgggtattgttatgttttttgttttggaggtcgataaatagtgtttgaatagaagttggtttatatgggtagagatgtatagatttgatataaaattgtattgatttagaaatttttggtattagatttagaatggggttagttgttttgtaattgttcgttgattatttaaagaaagatatacggaattttaagggaatatttatttatttatttgttatttgtaagaatagataggaagaagaaggaatgtttatttaggtataagaaatattaatttaataaaagtagatatttttttagtggttgaggtattaattatattaaagttgattttttttttttatttaagtaatacgtaataagttaagttatgtttgatttttgtgtatgtggtataaagaaaatttttttttaaatattttgtaagattgatatggaatttttttatttatgatatttttgagttatttatttttgattatatatttattatttaaaaatattaggatttgtttttaagtgacggatgaggagaatggaaatggtagatttgtttttttaatatttaagttaaagatgagtttttttttttattaagaggttatttagtagagtggtttggtgtttggtttttgtatttatattatttttttaagcgttttaagtattagttttttgttttgtgggataataataggatttatattatatgattgtgttgtttaagtaagttgtttaaagtgtttaatttagtttgtatttgttgagtatttgttattttttaaaataattttaatgattaaaaaaaaaaataatttatgaatgagattttatcgtggtttggtattttttattaagtagaattaaatttatttttttttttttttttatttattttagttgttagttacgatttaattatagaaattggaaagtgaatttgttatatttaagtatgattgtatatttttggtattaaaatttttgttttgggttattttgtaaatgaattggtattagagtattttttttttttttttttttttttttttttttttttttcgattttttagtgtttaaattttatgggatggaatttaatttagatttattttttattgaatttttaaggttaggatgtgttgttttattattttgataaaatgtttattcgtaaattttatattatataaagaaatgttgtgtaatatataaagaaatattttgttaaaaaaaagttaagtcgttttttatgagaaatagtgattttagtttttttttttagtttagggaagatgtttgtgatattgttttgttagatttgggggagaaagggtttttttttgttattttttagggtttttgcgggtatatagttgtatacgtgagggaagttaatgttgaaattttttttggttatttgtttaaaatttatttatgtttagtgttttattattggaatattaagtatgtgggagttatttatatttttttgtataaggttatcgttaaggtttgattgtaaaaatttaaaaaattgtaattttaggtataaatgggttataatattaggtaagtgttttggtgggatagttattgttgtttttaggttagtggtttttttttttgtgattgttttggttttttttttatttaatgttgggatgttttgggagatttggaggagaggttttttttttttagttgattttttttttgttttgttttggggagtattgggggaataaacgttaattaggaataatatgatattttttttaaatattttttggaatttgttatttttttttttaataagaataattatgttagtaattttattattgggtatatatttaaaggattataaattattttattataaagatatatgtatacgtgtgtttattgtagtattatttataatagtaaagatttggagttaattaaaatgtttattaatgatagattggattaagaaaatgtggtatatatatattatggaatattatgtagttataaaaaagaatgattttatgttttttttagggatatggatgaagttgggaattattatttttagtaaattaatataggaatagaaaattaaattttgtatgtttttatttataagggggagttaataatgagaatatatgatataggggaatattatatatcggggtttgttttggggtgggaggtaagcggagggagagtattaggataaatttttaatgtatgtggggttaaaatttaaatgacgggttgatgggtgtagtaaattattatggtacgtttatatttatataataaatttgtatgttttgtatatgtattttagaatttaaagtaaaatttttaaaaaaagaaaaagtgagataaatattttttaaaaaaagaataattatgttagtaatgtgtattataattgattatattaatttaaattattttaagttttttaggggattatttagtttttcgtgagtttattttttttattatgaatttattggtagaataaattattatttttaattttgtatgtgtgtaaatttagatttttatatattgaaagattggtatatttatattatagagtttagtgatagaaagttgggtttatgtttatgtatgtatgtttatttttttttttttttttttttttttttttttttgtttttttttttgttttaaaaataaattatttagttgtttattttttttttatgtggagtaatttgtttgaagtgtgaggtagaagtttagatttatatttgtttgtttgtttttagtttattaatggttattttaattgggtttttaatttgttaaaagtgtaaattggttagatgtttttgcggttttttaaattttgagtgatgtaattggtgttagagatttgtgagttagattaaaaagatgggcgtggtagatttgaatattaatcgatgaaaaatggtttgggcgagatttttatttgatttttatatttatttggttttgttttataatttatgtcgtttttagtaatatatagtgaggaggaaaaataaatggtttataggatatttggtattgtttggttttggtggtgttatgaattttagttatatttttttttgtttatattattttaggatatttgaaaataaattttgtagttttttttttttgtaatttttttgttttttgaagttttatggtttagttttagtgttaggtgaattattttaatttaaagttttttatgttttttaaaaaataaataaataagagatgattgattttaagatttgtttattatttagttttttttacgggggataaaaattaatgtttatgtgttgatttgtaaatttggagatttgggacgtagaaattttttgtttttatttaaataaatgggtaaatgataagagcgtttaaatattatttttttattttgtaagatggtgggtgaaaaagttgagaagtcggatattaaggagaagaaatttgaagttaataaggttttgttagtggtaaggtgaaaaggggaattttagagttaaaaagtttaagaaggggaagtttaaaattttgtttttattggaggaattggtagatatttttgatttgttatgtattttagaaaggttatgtacgagaggaggtatttagttgttaaatttaagattgaaaagaatttcgtaatcgttataaatttagttgaggtgataagaatggtgatgtttggttatttaaattttataaaatgttttgatattatttaatagagatgtgttttaaaagttgtttagttatcgtaagaaattttgtagttagtatgtgagaaaatttggagttagtacggttttcgagattattttgtttatttttttttggtgttattaaggtaggagggtggtttttttggagtagttgggtagtagtttgttatttgtggttggatttttggttttttatggagtttttttgtgaaggatatattagaaatttgttattattatttttataaaaattgatattaggattgggtgtagtggtttatatttataattttagtattttgggaggttaaggtgggtggattatttgaggttaggagttcgagattaatttggttaatatggcgaaattttcgtttttattaaaaatataaaaattagtcgggtatggtggtatatatttgtaattttagttatttgagaggttgaggtatgagaattatttgaatttgggagttggaggttgtagtgagttgagatggtattattgtattttagtttgggtattagagtaagattgttttaaaaaaaaaaaaaaaatcgatattagtagtgtgagaaatttaaaatattttattaatgtttattttaagaagtagttgtggaagtttagttagtaggagggtgagatttttgatagaaaaagagaaatgtaagattataaagtagtgtaaggttgattagaaaattatggattggtaaattttattaaaatttaaagttattttttagttttagggttatttgtaatttgtgtgtgttttggtgaatggaatttatttttataaattggtgttttaaattttttaagaagaatttaattatgtaattaaaaaaaaataaatgaatgtcgttaatttttttgggagtttggagtttggtgggagaattaaggaagttttgggtgggttgttgggatgcggggggtttttaggtgtttaatgattgagtagagttttttgtgaggttatttttgttttgggatagtagtataggttaaataaaagttttatggggtttttatttgttagggttgttttaataaaatattatagaacgggaggtttaaatagtagatatttattattttagttttggtgattagaagtttaaaattaagagggtagtagggttggttttttttgagagttgtgaaggaaggattttttgtgtatttttttttttggtttgtagatggttgtttgtatatttatatagtgttttttttttgtggatgagtttgtttttaaatttttttttagaaggatattagttattgtggattagagtttattttaataattttattttaatttcgttatttttgtaaagattttaaataaagttatattttgaggtgtttggaagttaggattttaatatatgttttttgagggggagggagatataattttatttatagtatttggattgatttaaaaaagggaagatttttaaggtgaagtatagaaatgaggagaaatagtgagatatagagatatatttgtagtagaaataaaattttttagattaaggtagtttttttttttaggtaggtcggggtaggttatgttagtatttgaaaaaaagagtagttgtaaagtagggggaaaaaatttttttaatattttggaaagatttgtagtggattaaatgatatttggtgttttattattaggatatttgtgttttagagggagtgaaaattagtttggtattgtgattttgggtaagttttttaatttttgtggtttttatcgtttgattttttattttatttttaagaggtatattataatagtatttgttttatagagttgttttgagaaattagtaagatagttttttattattaagttttatcggtgtatgtagtaaattgtttttagttaatgtttgttgtttttgtcgttattcgggttggatgtagatttaggtcgcggcgggatttttatgttttttgttgtgtggtagattaaaatgaggtattgtttttgtagagtaagtttagtagttttggttttcgtttgtaagtaggtgttttggtttattgttgagtaagtggtggttatggtggtgtttattgggtgaggggtagttatagtttgggaatcgaggttttttttttaaaatttttttttttgtaaaaataaaaaataaataaataaaaaaaaaaaagataataataataattttttgatttatgttgtaaagggtgtgtttggttttttaaataattgttgtagtaattgtttgaatttagtttttgtatttgagggaaattttgataaacggtaaaaattttacgtagacggttggttaattattataggtagtttagataaaatgttatagaattttttggaaatttattttaatttttttttaagtagtgtttttgaggaaatttaggtgtttggtttggtggtttcgggtaattttagtgatgaaggatggttttttattagtattattgcgatttagggtattttatatttgaatggtattgtgtttatggaaggaggaagtgtaggtgggatttgtttgagagattaaagtttttttttgatataattttagtattagtgtagtttgttttgaattattcgggtaaaggttttgttttgttgttttatttggttgtgaggatgtttttgtgtaggttgtttttagaatatttttattagtgggttattaaaagttgggaattgtgaagagaaatgttttgttggataatgtttatagttttgattaagtaaacgtgagtggtaaaatgaatttttggttaatagtattttaaatattaattcgttgaattttttaattttcgaaggtaggtattattattattatttttgttttatagatgagtagatagggttacgagttagtcggtggaggagttaagatttaagttagttagtttaatttttgggtttatgtttttaataatcgtatggtgtggtagatttgtttttaaataaattatggtattttacgtgtggtaatggaaagtagtgatttttattttttattggaaattttcggtgaggggtaggtttaaatgtaaatgataaaataaaggataagtatatttttttttttattttttaggttttattgaaatattttagatagtgatttttttgagtatttgattaaaataaggtattttttttatttttatttgtttttttattatttaatttgtgtttttttggaagattgaaggtgttaaaaaaaaaaaaattagtttaagaagagatgatttagttcgattagttttgggttatttattgagtagaaatttgttagtgtatttaaaggagaaataattttttttattaataataaaaatgtattatataataaagttttgaatgttgaatgagttttttttaatatattatgtttattgaaagtttttataggtgagaataaattaataagatatttatgttaggtaattataaatgttttagaatttatttaatatttgatgatggtttgatatatgtaagggatagtatgaagagatttgataagttaaaaataaggtttttgtttttaaggattttatttaatagtggtagtaatgttaatagataaatgataaaaaaaaaaaaaaaatatatatatatatatatatatattaattagaattggttttgagaggaagagattggttggaaattaaggaagattttatgaaggaagtagggtttaggttttagttttatgaagatagattttgtattttttattttggtattttagtttttggtacggtatttgggatatattagaagtggtgtagtttattgttatttaaataattaagttgaatttagatggtaagatgtgagaagtagaaatgaggaaatatttttatttaattttattaagtaaatatttattgtttattttttttgggttaggttttgtgttaggtagggagagtagtaggggtgagagtttggttgttagagagtttagggtgtaaagtttatttgggtggaggtgtgattgggtgtgggaagggagtggtagataaggttggaagagttgggagtagtatttgaaagattttgaatgttgaggagtttaaggagaaagattttttaatgtgttattattgtttatatttttatttgtattaagtaaatataggttgatagttgatcgtgtatattttgttaatattatagaaaattagtttgttagatttaatttatttatttataattgataatattattttgtaatatgttagaatttgaggttgttatttgtttttatgtgtttttaaattaaataagtattttaaagtagtaatgttttgtttaattatgagttaattttaaaatgatgtttagatatgttaattaaattaattatgttgtaaaagttaatttttaaatatgtaaggaatttatgaattttggagttttgaagggttttaattttagtttttttttaaaatagttgtggaattttagggtaagttgtttaatttatatagtatgtataaatatatatatatatatatatgatatttgtatatttttatagttttatttttgtttatgttttatgttatatatttatatttaggtagttattaaattatataaagtatagtagtaagagttgaaattttagagtttaaattttggaattgataatttggttggaggtaaggtaatgttattttttagttgtatgtttttaggtaaattgtttgatttttaattttaatttttttatttataaaatgagaagaataatttttagtttattatatttgagaaaattataggagtataaattttttttttttttttttttttttttttttttttagatagagtttcgttttattatttaggttggagtataatggtttagttttaatttattgtaatttttgttttttaggtttaagtaatttttttgttttagttttttaagtagttgggattataggtatttattgttatttttggttaatttttgtatttttagtagagacggggttttattatgttgattaggtttgtttcgaattgttgattttgtgatttgtttgttttagttttttaaagtgttgggattataggtttgagttatcgtgtttggttaagaggataaatttattattgagtaatggttatgtgttttttatgtgaggagattaaggtatcgaaagatgaagtagtatatttatagttatatagttatagagagtagtgttgcgttgttaggttagttttttgattttaagtttatttgttatattattttgttattgtttttatttttaattttaatttattatttatttttattttttgaagttaggtttcgtttgttttttaggttgaagttagggggtattaagggcgggtgtaatttgggttttggggtttaagtgatttttttattttagttttttagggtgaagtggtattattgtgtgggataaaatattcgaggttattattttagggtagagaaatagaaaatttgggtaaataagaagtgagtttaagagtagaggtttaataggtaaaagaaagagaaagcggattagttttattttttgtagatagaggggggtgttcgagtgggtttttcggttttgtggtgaaatggtatagggttttatatatgaatttgaggaggcggtatttgatttatatagggtcggagagattggttggattaggtgtgatgtttgtatagtgtttgaagaagttggtttaattttttattatgtagatggattttttatttggttagtattatatagtttgttgtttattgtatacgtggttataaagaaaagggaagatggagtcgtcgtgttgaatatgttcgggtttttagatagtttttttttattggtcgagttgttggtatttatttgtggaaatttttagtttgtttatttatgtttgtagttggattttataggttgttttttgttagaaatgattttggggttgttttttgttaaaaggaaattttattgaggatttttttatttttattatttgtttaaataatttatttttagtttttgtattataagtagttgggattataggtaatgagttatttatttggttaatttttgtgtttttagtagagatgggggtttcgttatgttggttagggtggttttaaatttttgagtttaagtaatttatttgtttcggttttttaaagtgttgggtttttggatgtgaattattgtttttcgtttgttattgtttttaaagatttttttgtaaatttatattttgggtgatgtttaataaaggattgtttttttattttttagaatattggtgaggttaaaatgaaatagtatttttattttttaaagtttaaatataagttatgtaaatgtagggtatgtaaaatttttaggatttaaatttttagagtggttaaaatgttagtgaaattttttttatgttggtgatattagtgatatgtgtttaatgtagaaaaattttaaagaataagatgatgaagtaaattaagattatttttaatttttagagataataaagtgattggaattttcgtgaaataaatatattgaaaaaatttttttgatttagttaggtgtggtggtttacgtttgtaattttagtattttgggaggtcgacgtaggtagattacgaggtcgggagattgagattatcgtggttaatacggtaaaattttatttttattaaaaatataaaaaattagttaggcgtggtggtaggcgtttgtagttttagttatttgggaggttgaggtaggagaatggtgtaaatttgggaggcggagtttgtaataagttgagatcgtgttattgtattttagtttgggcgatagagtaggattttgtttttaaaaaaaaaaaaaaaatttttttgattgttttttggggaggggtagtttaaatttatgataggtaataatattgttttttaggttatgtggaaaattttttttatattttaaaattaattagttatgatatgttttatagtgaaagttataatttttgtgaaatgggaagttttaaggaggaagggaaaaataatatcggataggagataataaggatagagtttagatttttgtttgattttttttggaatagtaagaaattaatttttttttaggtttattgtgtaggtaatgataatatttagaagattaaagaggtagttggtgatatttttgaatgaagaattgtgagtattttttagttttttttatttgcggaattttatatgtttgtggttttgaattaaaatgtttagttattttggaatttgttaaaatatattttttttatttgtataataggagtgaaaggaatatttattgttggttgggtatttgtaattttagtattttgggaggtcgacgtaggtagattatttgaagttaggaattcgaaattagtttggttattatggtgaaattttgtttttattaaaaatataaaaaattagttaggcgtggtgatgggtatttgtaattttagttatttgggaagttaaggtgggagaattgtttgaatttaggaggtggaggttgtagtgagatgagattgtattattgtattatagtttggatgataaagtgagattgcgtttttaaaaattttaaaataaatatttattgtttattatttaagacgttgaaatgaagaagattataataaagtaaagtagttagataaatggaattattgtgagtatgttttgagatgttggtttgtatattgttatggatgatgtgtatgaagtttttggaagattgggttgttttatatagaggagaggttggttttttgggatattattttattagatttataattggatattatttattgatttttattgattggaaagatatgattttaatagattggtaattaattatttttttatttggtttt

SEQ ID NO: 48 - DNA, 18817 bp, Artificial Sequence
  chemically treated genomic DNA (Homo sapiens)
ggaattagataaaaaaatggttagttattagtttgttaaaattatgtttttttaattagtaagaattaatggatgatatttagttataaatttagtaaaatggtattttaaaaggttagttttttttttatatggagtagtttagttttttagaagttttatgtatattatttatagtaatatgtaagttaatattttaaaatatgtttataataattttatttatttaattgttttgttttgttatgattttttttattttagcgttttaaatgatgggtaatgagtgtttgttttggggtttttggaaacgtagttttattttgttatttaggttgtagtgtagtggtgtaattttattttattgtaatttttattttttgggtttaagtagtttttttattttagttttttaagtagttgggattataaatgtttattattacgtttggttaattttttgtatttttagtagagataggattttattatggtgattaagttagtttcgaatttttgattttaggtgatttgtttgcgtcggttttttaaagtgttgggattatagatgtttagttagtaatgagtattttttttatttttattatatagatggagaagatgtattttggtagattttaggataattaaatattttgatttaaagttataaatatatgagatttcgtaagtgaaaagaattaaagaatgtttataattttttatttaaagatgttattagttgtttttttgattttttagatattgttattatttatataataaatttaagaaaaaattaattttttattattttaaaagagattaaataaaaatttgaattttgtttttattgttttttgttcgatattatttttttttttttttttaaggttttttattttatagagattgtgatttttattatgagatatgttatgattaattgattttaagatgtgagagaaattttttatatggtttggaaaatagtgttgttatttgttataagtttggattgtttttttttaaaagatagttaaggaaattttttttttttttttggagatagagttttgttttgtcgtttaggttggagtgtagtggtacgattttagtttattgtaagtttcgttttttaggtttatattatttttttgttttagttttttaagtagttgggattataggcgtttgttattacgtttggttaattttttgtatttttagtagagatggggttttgtcgtgttagttacgatggttttaatttttcgatttcgtgatttgtttgcgtcggttttttaaagtgttgggattataggcgtgagttattatatttggttgagttaagaaaatttttttaatgtatttattttacgaaaattttaattattttattatttttagagattaggaataattttggtttattttattattttattttttaaagtttttttatattgaatatatattattaatattattagtatggaaaaaattttattaatattttaattattttaaaaatttagattttgaaaattttatatgttttatatttgtataatttatatttgaattttaaagggtaaaaatgttattttattttagttttattaatgttttgggagataaagaaataattttttattaagtattatttaggatgtagatttgtagagaggtttttaaaaatagtaataggcgggaaataatggtttatatttagaagtttagtattttgggagatcgaggtaggtgggttgtttgagtttaggagtttgagattattttggttaatatggcgagatttttatttttattaaaaatataaaaattagttaggtgggtgatttattgtttgtaattttagttatttgtgatataggagttggaaataaattatttaggtagatagtaagggtaagagagtttttagtaaggtttttttttaataaaaagtagttttaaaattatttttaataaagagtagtttgtagaatttagttgtagatatagataagtaagttggaagtttttataggtgaatgttagtagttcggttaataggaaaaggttatttgggggttcgggtatgtttaatacggcggttttatttttttttttttttgtaattacgtgtatagtaagtaatagattatatggtgttagttaggtagagaatttatttgtataataaaagattaggttagtttttttaagtattatgtaaatattatatttggtttaattaattttttcggttttgtgtaaattagatatcgtttttttaagtttatatataaaattttgtgttattttattataaaatcggaagatttattcgggtatttttttttatttgtaggagatagagttaattcgtttttttttttttttgtttattaaatttttgtttttaaatttattttttgtttgtttaggttttttatttttttattttgaggtgatgatttcgggtattttattttatataatgatgttattttattttgggaggttgaggtgggagggttatttgagttttagagtttaggttgtattcgtttttgatgttttttgattttaatttgggggataaacgagatttggttttaaaaaataaaaataaataataaattaaaattaaaaataaaaatagtaatagagtggtatggtaggtaggtttggagttagaaagttggtttagtaacgtagtattgttttttatagttatgtggttatggatatattattttatttttcggtgttttagtttttttatatggaaaatatatagttattgtttaataataagtttgtttttttggttaggtacggtggtttaggtttgtaattttagtattttgggaggttgaggtaggtagattataaggttagtagttcgagataagtttggttaatatagtgaaatttcgtttttattaaaaatataaaaattagttagaagtggtagtaggtgtttgtagttttagttatttgggaggttgaggtaggagaattgtttgaatttggaaggtagaggttgtagtgagttgagattgggttattgtattttagtttgggtgatggaacgagattttgtttaaaaaaaaaaaaaaaaaaagaaaaaaagaaaaagtttgtgtttttatgatttttttagatataatgagttgggaattgttttttttattttgtaggtgagaaaattgaggttaaaagttaagtaatttgtttaaagatatatagttaggaagtgatattattttgtttttaattagattattaattttagagtttaaattttggaattttaatttttgttattgtgttttatatagtttgatagttatttagatgtagatgtatgatatagagtatggatagagatagagttgtagagatatataaatattatgtatgtatgtatatatatttatatatgttatataaattaagtaatttgttttgaaattttataattattttaaggaaaagttaggattaaaattttttaggattttaagatttataaattttttgtatgtttaaaaattagtttttgtaatataattaatttggttgatatatttaaatattattttagaattaatttatagttaaataagatattattgttttagagtatttatttggtttggaaatatatagaaataagtaataattttagattttagtatattgtaagatgatattattaattataaatgaataaattaagtttaataaattagttttttgtaatattagtaaaatgtatacggttagttattaatttgtatttgtttaatataagtaaaaatataggtaataatgatatattgggagatttttttttttaaattttttagtatttaagattttttaaatgttgtttttaatttttttagttttatttgttattttttttttatatttagttatatttttatttagatggattttgtattttgagttttttggtagttaagtttttatttttgttgttttttttgtttggtataaggtttggtttagagaaaatggataatggatatttgtttaatgaggttggatggagatgtttttttatttttgttttttatattttattatttaagtttaatttaattatttaaatagtaatgaattatattatttttagtatgttttagatatcgtgttaagaattggagtattaaaataaggggtatagggtttatttttatggagttaggatttaaattttattttttttatgaaattttttttgatttttagttagttttttttttttagagttagttttgattgatatatatatatatatatatatattttttttttttttttattatttgtttgttagtattattgttattattaaataaaatttttaagggtagaggttttatttttaatttattaggtttttttatattattttttgtatatattaagttattattagatgttgggtaaattttaaaatatttatgattatttaatatggatattttattaatttgtttttatttgtaagagtttttaataaatatgatatattaaaggaaatttatttaatatttaaagttttattgtgtaatatatttttattgttgatgaaaagagttgttttttttttgaatatattaatagatttttgtttagtaaataatttagaattggtcgaattagattatttttttttgaattaatttttttttttttaatatttttagttttttagaaaaatataagttaaatgatagaaaagtaaataaaaataaaaggaatgttttattttggttagatgtttagagagattattgtttgggatgttttaatggaatttaggaagtagaaggagaaatgtatttattttttattttgttatttatatttaggtttgttttttatcgagggtttttagtgggaagtagaagttattgttttttattgttatacgtagggtgttatgatttatttgaagataaatttattatattatgcggttgttaggagtatagatttaggagttagattggttggtttgggttttaatttttttatcggttgattcgtggttttatttatttatttataaagtagggataataataataatatttattttcgagagttaagagatttagcgagttaatatttggaatattgttggttaaaaatttattttgttatttacgtttgtttagttaaaattgtaaatattgtttaataggatatttttttttataatttttaatttttggtggtttattaatgaaaatattttaaaaatagtttatataggaatatttttatagttaaatgaggtagtaaggtaaagtttttattcgaatgatttaaggtaaattatattagtgttaggattatgttaaaagaggattttggttttttaaataggttttatttatattttttttttttatggatataatattatttaagtgtggggtattttgggtcgtaatggtgttgatgggaagttattttttattattgaaattgttcgaaattattaagttagatatttaggtttttttaaaaatattatttggaaaagaattgaaatagatttttagaggattttgtggtattttatttgaattatttgtaataattggttaatcgtttgcgtggaatttttgtcgtttgttaggattttttttagatataaggattaaatttagatagttattatagtaattatttgagagattaagtatattttttgtaatatagattagagggttattattattattttttttttttttgtttgtttgttttttgtttttataaaaaaaggagttttgaaaagaaggtttcggtttttaaattgtggttgttttttatttaatgggtattattatgattattatttgtttaatagtagattagggtatttgtttgtagacgggaattagggttgttgggtttgttttgtaggaatagtgttttattttaatttattatataatagaagatatgggaatttcgtcgcggtttggatttgtatttagttcggataacgataaaggtagtaaatattgattgaaaataatttgttgtatgtatcgataagatttggtggtgaaaaattattttgttgattttttagaataattttatggagtagatgttattataatatattttttaaagatgaaatgaaaaattaaacgatgaagattatagaaattaagagatttgtttaaggttataatgttaggttaatttttattttttttgaaatataaatattttgatgatgagatattaagtattatttaatttattatagatttttttaaaatgttgaaaaggttttttttttttattttgtagttgtttttttttttagatgttgatatgatttgtttcgatttgtttggaggaaaaggttgttttggtttgggaagttttgtttttattgtaaatgtatttttgtgttttattatttttttttatttttgtgttttattttaggaatttttttttttttaaattaatttaaatgttatgggtagaattgtgttttttttttttttaaaaagtatatgttggagttttaatttttaagtattttagaatgtgattttatttggagtttttatagaggtaacgaagttaaaatgaggttgttagagtgggttttaatttataatgattgatgtttttttaagaagagatttggagataggtttatttataaagaaagaatattgtgtgaatgtatagatagttatttataagttaaggagagaggtgtatagaagattttttttttatagtttttaggaggaattaattttattgtttttttgattttggatttttggttattagaattgagatggtaaatatttgttgtttaagtttttcgttttgtggtattttgttaaggtagttttagtaaatgaagattttatggaatttttgtttagtttgtgttgttgttttaggatagaggtggttttatagggggttttgtttagttattagatatttagggatttttcgtattttagtagtttatttaaggtttttttgatttttttattaggttttaagtttttaaggggattaacggtatttatttatttttttttagttatataattaggttttttttaagaaatttagaatattaatttgtgaggataaattttatttattagggtatatatagattgtaggtagttttggagttgaggaatagttttgagttttggtaaaatttgttagtttatggttttttgattagttttgtattgttttgtagttttatatttttttttttttgttaaagattttatttttttattgattaggtttttataattgttttttaaagtaggtattggtaagatgttttgggttttttatattgttggtatcgattttttttttttttttgagatagttttgttttgatgtttaggttggagtgtaatgatgttattttagtttattgtaatttttagtttttaggtttaagtgatttttatgttttagttttttaagtagttgggattataggtgtgtgttattatattcggttaatttttgtatttttaatggagacgggggtttcgttatgttggttaggttggtttcgaatttttggttttaagtgatttatttattttgattttttagagtgttgggattataggtgtgagttattgtatttagttttgatattaatttttatggaggtggtgatgataaatttttggtgtgttttttatagaggaattttatggaagattagaggtttagttataagtaataagttattgtttagttgttttaggaaaattatttttttgttttggtggtattaagggaggatgagtagaatggtttcgagggtcgtgttggttttaagtttttttatatgttgattgtagagttttttgcgatggttggatagtttttgaggtatatttttgttggataatattaaggtattttgtgaagtttaaatagttaggtattattatttttgttattttaattgggtttgtaacggttgcgagattttttttaattttgggtttagtagttaagtattttttttcgtatatggtttttttggaatatatagtagattaggaatatttgttaatttttttaatgaggataggattttgggttttttttttttgggttttttagttttgaggtttttttttttattttgttattggtaaagttttgttagttttaggttttttttttttagtattcggttttttaatttttttatttattattttgtaagatgggaaggtgatgtttagacgtttttgttatttatttatttatttgagtaaggataaggagtttttacgttttagatttttagatttataagttaatatataagtattgatttttgtttttcgtgaaaaaagttaagtgatagataaattttagagttagttattttttatttatttattttttaaaaagtatgaagggttttgaattaaaataatttatttagtattaaggttgagttatgaagttttaaagaataaagaagttgtagaaggagagagttatagaatttgtttttaaatattttaaggtagtgtgggtaggaagggatgtgattggaatttataatattattaggattaaatagtgttaaatattttgtgagttatttattttttttttttattgtatattgttaagagcggtataaattataaggtaaggttagatagatataaagattagatgaaaatttcgtttaaattattttttatcgattaatgtttagatttgttacgtttatttttttggtttggtttatagatttttggtattaattgtattatttaaggtttagagaatcgtagaagtatttgattaatttgtatttttgataaattaaggatttaattaaagtggttattaataagttagaaataagtagataggtataaatttgggtttttgttttatattttaaatagattattttatatggggagggaatgggtagttggatgatttgtttttagagtagagaggaagatagggaagaaggaaggaaaggagggagggagggatgaatatatatatataaatataagtttagttttttgttattaaattttgtaatatagatatgttaattttttagtatatgaaaatttggatttatatatatgtaaaattagaggtgatgatttgttttattaataggtttatgatagggaagatgggtttacgggaggttaaatggttttttggagaatttaaaatggtttagattgatataattaattataatatatattattagtataattattttttttttaaaaaatgtttgttttattttttttttttttaaaaattttattttaagttttgggatatatgtgtagaatatgtaggtttgttatataggtatagacgtgttatggtggtttgttgtatttattaattcgttatttaggttttagttttatatgtattagggatttgttttaatatttttttttcgtttgttttttattttaggataggtttcgatgtgtgatgtttttttgtgttatgtgtttttattgttaatttttttttatgagtgagaatatgtagagtttggttttttgtttttgtgttagtttgttgagaatgatggtttttagttttatttatgtttttgaaaaggatatgaaattatttttttttatggttgtatagtattttatggtgtatatgtgttatatttttttaatttagtttattattgatgggtattttggttggttttaagtttttgttattgtaaatagtgttgtaataaatatacgtgtatatgtgtttttatagtagaatgatttataattttttgggtatatatttagtaatgggattattagtataattatttttattaaagaaaagaataataagttttaagaaatatttgagagaggtgttatgttgtttttggttggcgtttgtttttttagtgttttttaagatagagtaagggaaggattagttggggagaagaggttttttttttaagttttttaaaatattttagtattgaatggaaggggggttagagtagttataggaaagggagttattgatttagggataatagtgattgttttattagggtatttgtttgatgttgtaatttatttatatttgaggttgtaattttttgaatttttgtaattagattttgacgatgattttgtgtagaaggatataaataatttttatatgtttagtgttttaataatggaatattaggtataaatgggttttaagtaggtagttaggaagaattttagtattgattttttttacgtgtgtagttatatattcgtaaaaattttagaaggtggtagggggagatttttttttttttagatttagtagaataatattataagtattttttttggattaaagaggaggattggaattattattttttataaagggcggtttgatttttttttgataaagtgtttttttatgtattatataatatttttttatgtaatataaagtttacggatgagtattttgttaagataataaagtaatatattttggttttagaaatttagtaggaagtaaatttaaattaggttttattttataggatttagatattgaaggatcgaaagaaagaaagaaaagagaagagaagagaaagaaaaatattttaatattagtttatttgtaaagtgatttaaggtaggaattttaatgttaagaatgtgtagttatgtttaagtatggtaggtttattttttaatttttgtaattaaatcgtaattgataattgggatgggtaggagaggaagggaaaataaatttaattttgtttaataaaaggtgttagattacgatgaaattttatttatgaattgtttttttttttaattattggaattgttttaaaaaatagtaaatgtttaataaatgtaagttaagttaaatattttggataatttatttgaataatataattatataatgtgggttttgttgttattttatagagtaggaaattgatgtttagagcgtttgaggaagtggtgtgaatgtaggggttaagtattaagttattttgttagatggttttttggtgaggaagagaatttatttttagtttagatgttaagggaataaatttattatttttattttttttattcgttatttaagaataagttttaatatttttaagtaataagtatatggttaaaaatgaataatttagaaatattatgaatgagagaattttatgttagttttatagaatatttgaagagaaattttttttgtattatatatataaaaattaagtatagtttagtttgttacgtattgtttaagtgaaaaaaaaaaattaattttagtgtagttaatattttagttattaggggaatatttgtttttattaagttaatattttttgtatttaagtaaatatttttttttttttttgtttgtttttataagtaataaataagtagataggtatttttttaaaatttcgtgtgtttttttttggataattaacgagtagttatagaataattagttttattttaaatttgatattagagatttttgaattaatgtaattttatgttaaatttatatatttttatttatgtgaattagtttttgtttaagtattgtttgtcggtttttagagtaaggagtatgataatgtttagtttttttttttagagttgttgttgttaatgtggaagaaaaatgagggatatatttttttagatattttttttgataatggaacgagaagtagagtttttgttaggatatattttgtatattatttagattttttttttttttttttttgagataggtttttattttgttatttaggttggaatgtagtggtataattatgatttattgtagttttaattttttgggtttaaggaatttttttattttagttttttaagtcgttaggattataggtaagtgttattatgtttggttaatttttaatttttttgtatagtttggatttttttatgtttagattttttaggttggttttgaattttagtataagcggttttttttttttagttttttaaagtattggaattataggaatgatttattatatttagttatattttgttttttgtatgagaaaggaggaggtatcggaaatgtaatttttattttgaatagtgatgattttttttaggggttatttgggtgagttttaaaggatgttttatttgtattttatttaaagatttatatgggaattatgagaggggttttaaaatgttatatatatagtaaaattaatagttttattatttttatatttttgaattttattttttgaatatagaattagttttttttttgtataatggtagatgttatttttatggtattattgattttttttttatttttttaaagaatgaaataaaaattttttaatttattttgagttatttatttgaatttttttatggaatagagcgttaatatttattggatgtgtattatgtattaagtaatatagtaagttttttatttatttatttaatttattttttataattatttagttaggtaagtttttagtggtagttttttgttttgtgtttataggttggaaaatgatgaaattggtttaatttatttggttaattttgaagatttatatggtttcgtaatttattagaaatttttttttagtaaaggattcgttttgttttttggtgagagttgaatagtatttattttttttttatttaaatatgtgtttttttttttttttttaaataatgttttatttgttatttaagtttttgaagaaaaataaagataagaaaatattagagaaggtattgtttttttaatttgttgtttggtattttttattatagagggtatttgtttttataaagttatttgttataaaagattaagatagaggtaaatatcggattattgaagatattaataagttgtgtgtggtttaatataaaaataattatatattagtaggtggtaattttattattaaggttaaaagtagtttaggaagttgattaatacgtatattagtttttttttttatttgtgaaggtaggtttgtttgtttttaatttttattttagtatttttataaaaagatttttttttttttttgtatgtttttttttttgttgtgttttagataattttaagaattttaaattgaattttattttttgagaagtagatagaatgatatgttttttgagaatgtgattttaattttaatttttagaatataagagttttagagtattttaagattagggatttttatatatttattataaagaatggatgtgatatttgtttaaatattagagaatttaattttttttttaattttattgttaagtttgattttattgtagttattttattaaatgaatttataaaatatggattaatgaaaagaaattataaaaaaaaattgtgttttataagtaaaatttgttatgttagtaataaatttttttttttcgtatttgtatagtttattttaaagaataaatttgttaagtaattttttaagtgttttttttttttatttattttgtttttttggaataaatacgttattgatatagttaagatatgttagtttttatttttttgtaagttataaaatggtggttaaaagttttttttttttatttagtggtcgagatttttgttacgattggagtatttttttcgggaatatttttttttttttgttttgttttttagtttttttttttagttttagttaaatattaattattaatattttttattgtttttcgagagttattgggtattataaaaagtgttattatttttattttaggaaagaaatgattttgtattaaaagaagtttaatttatatttaatttattttaaaataggttgttatattttttaatgtagatgagttaatgaaaagataagaagttagagtggaaaagtttttgtgtatttaattatttttagagtgtgaggtttatgatattaaagattttttatattttgtatttttaatatttagtataggagatttgattagtaaatatttatgtagattttattttaaatataaaagacggagtaggggcgttatgtttgagtaatgatatagtttattgataattagttatatgagatattataaatgatttagaagatatgaggaaagatataatatggttgtgtttgtttttgaaatttaagggttttttttaaagtttgtaagaaataatcgatagtaaattttttttaaatataaattaagttttttttttttttttataatttagggaatggatttatttaggaataatttatttttttttaattaaaatgaggtttttgattaattaataaaagttaatgtttttagattttttaagttaaggttttttttagattaatttttgatttttatattttggttattttgggaatttatattgaaggtgagtattaatgttatgtttgtgtttggtgtgttatatttggttttgtttttgtggatttttttatgtttattttttggttttttttgagttgaggttgtgttttttatttttttttaggtgtgtatttgatagagggaaagtaagagagtttagtttattttttagaagggtttttttttttttagattttatgagaaggttttatgagtgttttaagttattgtgggaatagattttatttattttgaggattttgtaagtgaaattatttagttgtatgttagttgttaatatttttggtggattggtgggtttagtaaaggttttttttgttttgttttatagttagtattatttatttagaagaatgaggttattgaggttaagtattttttatattttttatatttttgtttttttattagttgaataaagtgtgtttgttttataaaattaaatcgtttttatttgttatatgttttagtttttggaattaagggtaagtattttattatatagtattgtttataaagaagtttgggttttttttgaaaattttaaaataataaagtgtttttaaatttatgagttttttttttttaaaaataaagtgtatatgtattatttatagttattgttttttagtaataataataatgttcgtgatatgttggtatattaattaaaattttgtttttttatttagtatgtttgtaaagtagattttagtttatagatagaaaatggggatatagagaggttttattttttgtttaagttatatagtttttgattatagaatcgggattgtaattttgttttgatttaaattttattttatttattatagttatagattttgttagatttttttttttttagttttatgcgagtaaaaaaaaaaaaaaaaaaaaaaaaaaaagtttaagggtagaaatttttgtatgagtttatttttgttggaagatggttaagtttcgaaatggggtttttttgtatattatttgttatttttagtttttagtttttagtttaaagaattaggttaattaaatattgaaaatgtttaaattatttattagagaaattaataggtgattattgtatttttgaattatagaagttatttttgtattgtgggatattaggttaataagattttgagagttgtttatatattttttatatggtttagatatttttttagattaaatttaaatgttaagaatgtgtacgttttaggtagttattattgtattttaggaatttatttttatgaaaagtgagatattgttggtttaatagatttgttaataataggaataaggaaaatgtaattgataaatattattgatttaattttttaaagtaaaggaggtatgatttataggatgaaaataattgaaggttaggcgtagtggtttatatttgtaattttagtattttgggaggttgaggtaggtagattatttgaggttaggagtttgagattagtttgtttaatatggtgaaattttatttttattaaaaatgtaaaaattagttaggtgtggtggtaggtgtttgtaattttagttatttaggaggttgatttaggagaattatttgaatttgggaggtggaggttgtattgagtcgagattgtattattgtattttagtttagtcgatagagtaagattgtattttaaaaaaaaaaaaaaaaaagaaaataaaattgaataagtgaaaggatttgggttaatgtttttaatttatagttttatggtggtgaaaatattttaacgtttttgtttataatgttttaagtatttttttaatattatttttagaaaatataaatgtttataaataagtaattaatttatggatatttgtaagaaagtttagatagttttttagataaaaaagttatgaaaatttggaattatttttaaaagttaaagtatgttatatttttaatatttatatttttttttattttattttatttattttttgagatggagttttgatgtttttaaggttggagtgtaatggtataattttagtttattgtaattttcgttttttagttttaagtgatttttttgttttagttttttatgtagttgggattataggtgtttattattatattcggttaattttttatatttttagtagagacggggtttaattatgttggttagtttggttttgagtttttgattttaggtgatttgtttgttttggttttttaaagtgttgggattataggtatgagttattgtttttggtttatttttattttttaaaatttaaaatgaaatttatgagtggtaaattttttaattttttaagtatttgtattttatgttttttatgtgttatatattatatatttagaatattttattatgagtttattaatatataatttttatttaatagaagtgtaaaataatattttaattatttaatatttgttttgttttgttaatttgatgatggtagaaattttgtttttaattagtatttaataagtattttttaggatttaattttatttagttatttaatttaataattttaaatagttatgattatttgtaggtttaattaaggttaataggaatttagaaaagtaaataattttgaattttttgaaatttagagtttatagtttttgttttatatttatttagtggaatgaagtgaaattaattttttgttagttattgttttaggttgaagtagaattttttttaattatttttgttggttaggatagagtttattttttgataaatttaagtaaaataggttttatttttatgtagtttttatttttttggagatagggtttcgttttgttataggttgataggttggagtgtagtggtgcgatttcggtttatcgtagttttggttttttaggtttaagttatttttttatttaagttttttaagtagttgggattataggtatatattattatattttattttttttgtagagatggggttttatttatttaggttggattttaatttttggggtttaagatttgtttattttagttttttaaaatgttgggaatataagtgtaaggtattgcgtttggtttatatttatttttgagtttgggtttggggtttttgtttggaggtttttttgttgttgagttttttttttttggtagttttttaaattagaatatttgagagaattattataagatttaaaatttagataataaaatgaattattagttttaagtaagaaatattgaattatatataatgttgtttaaaaattttagttgatagttattttgcgatattttgaaaaatatttaaggaagatagtttgaggttagtaaagatttttttttttattatttattttgatagaagtggatttattttgtattttgtttattttaggaagatttttaattttatttatagatgttggttttaagtaattgtttagtaggcggggtttttaatttggttttagttacgtatgttatgaagtggttggagaattttatgaatgggatggttagtaagtatttatattattagttgtatattggataaatgttttttaggtttttttaaattgaagtttattaaaattggggtttatattatgaaattttggtttagggtatgtttttgggttttttgttttgttgtttaagttagattgtagtatgtaattatggtttattgtagtttcgattttttgggcgtaagtaatttttttgttttagtttttaaagtagttaggattataggtaagtgttattatattagttaattttaaaattttttgtagagataggttttatgttgtttaggttgtttttgaatttttgagtttaagtgatttttttgtttcggttttttaaagtgttggtattatagatgtgagttattatgtttggttggtattttggatttttgatgtaggtgattatataggtttttttgagaaatattagtttaaggaattattgttttattttttagtaaatattttttagtaaagtttattttgaattgagattaattattttattatgtagaatttatttttgtaggaatgtttgagataatgatgtagtcggtttgatgttgaatatgtaagttggatttggtagatatgagtatgtttatttttttttagatattttttttttagatagttaagttttttatttgattttgga

SEQ ID NO: 49 - DNA, 8413 bp, Artificial Sequence
  chemically treated genomic DNA (Homo sapiens)
tttaaatgtttttaatttaaggttttgttttttattaatagttgattgatgagagttgagtatttagatttttttttgttttggtaaatgatatatagttgttgtgaggtgattttgcgagagttagttttagttttgttagagggaaggagtttgagggtggtttatgtgttttaagggatttttttttagagttagtagtagggtttttgttggatatagaatagaatttaaggggtttttttgtatttttagagaacgttttgttatgtggggttagataaagtttattgaggagttaatgtttttttaggagttacgtggttcgagtttgtgattggtggattttgttttgttgaagtttggtgtaggtatagtcgtgtattttttttttttttttttttaaattaaggaaggaattttattttattttgaatgtgttagttttgatcgtttttattttgaaattttttttttgtttaattttatttatttattttttattagtatattttaagttttagggtatatgtgtataacgtgtaggtttgttatatatgtatatatgtgttatgttggtgtgttgtatttattaattcgttatttatattaggtgtattttttaatgttattttttttttttttttttattttacgataggtttcggtgtgtgatgtgtattttaatgattgggatatattttgaaaaacgagtttaggtgatttcgttgttgtgtaaatattagagagtgtgtttatataaagaaatttggatcgtatagtttgtcgtatatttaggttgtacggtatagtttattgtttttaggttttatatttgtgtagtatggtattgtattgaatgttgtagttaattttaatacgatagtaagtattgatgtatttaaatatatttaaatatagataagatataataaaatttttatgtaaaagataaaaaaggagtttgtaattttagtattttgggaggttaatgtaggaggattatttgaggtaggagtttaagattagtttgggcgatatagttaaatttttttattttaattatttttttaaaaaaatttaaaaattagttagatgtgttggtatatatttttttgtggggttgaggtgggaggattgtttgagtttaggagtttgaggttgtagtgagtcgtatttatattatattttagtttgggcgatagagggagatttaattttaaaaaaataaaaaagtaaaaaataaaaataaaaataaaaaaataaaaaatggtatatttttttatggtatatattatgagtggagtttttaggattagtaattggtttgggtgagttagggagtgagtggtgagtggtttaggacgttattgtattttattgtagatttaataaatatcgtatatttagttttattaaatttatttaaaaatatttttttttcgttaataagaaattagtttattattagggtagtgtaaaagtaattgttgttgttgtcgtttaaaaaaaaaaaaagttatcggttacggtggtttatgtttgtaattttagtattttgggaggttgacgcggcggatcgtttgaggttaggagtttgagattaatttggttaataaggtgaaattttatttttattaaaaatataaaaaaaaattggtcgggcgtggtgttacgcgtttgtaattttagttatttgggaggttgagttaggagaatgatttgaatttgggaggcggaggttgtagtgagttgagattatatcgttgtattttagaataaaattttgttttaaaggaaaaaataataaataaataaataaataaaatataattatttttgtattaatttaatataatattttttataaagttggtttatattattattattttaaatatacgagtaatggtttgtgttgtgacgttataatggttgtaatgttattagggtagaggaatttttagttttattaaaattttaggggattatatttatatgtgtagtttattgttgattaaatagttattttgtagtatatgattttatttatttatttgatcgttggttgcggttagttttagggattattaatttattttaataggttttaggaaagagaaaattatattttcgtttattgtattagagatggggtttttagtaggaaatagagcgaattttgggaggttaattgaagagattttatgaagggattgttttagagaggtgggtttttttaaggaaattaattattgtttgtatagaggtgggttcggatgttgaggtatttagagattagtaacggtatttttgtttggaattttttttttttttttgttagttttgtggttggtatttagatgtgggttgaaacgttcgtttttttagaggtttttttggttttataggtttagttagttgtttttttattttttgtagtattttttattgtaattttttgaatatttttgatcgttagttgatacgtttttttattgatttatttatttttttgttgtttttattattgtagattttttaagggagtgtgttttatttattgcggtatttttattgtttagtatggagtttattatgtagtaggtatttagtatttatttattagtttagagtttgggcgtttattttgttttgtttagagttttgagaattttttttttttttgtttttcgtttttatttttgtttattttattttgttatttttgagttattttttatttgaggtaggaagaaagaattaagatttgtattttttttttggataaagaaggaaatgagttatagggtttgggtttagtgaggttggggtaggggttatgtttgtcgttttttttgagttagggattagttttttggttaggatttttaatttgtttttttttttttttaagtttttttttatcgttttttttttgtttagagtatttttttaagggttttaagttttttttaggttgatttttttatttatggttgaggaaattgaggtttagaggggttagggttttttttaggtatatggtatttgtattttggggtttatttttattttgggagtttattttttttagggttagaggtaggaattagaaggtaggggtcgtcgatattaaaattagtgggtttagaggttagttggtttagtatagatatttttagttttttttgaggttagtttggcgttagtaaattaggggaaatgttattagagtttataaattttttgtgatgtatagagtttagtttttttttttggttagataggggatagttaagggaggaggttattttatttagtattttgtagatttttgtttgttttcgtatgtgagttttggtttttttttttatttatttgttttttttttatattattttaggagttgtaggttagtaatatagggattttagagggtggagagatagagttagggttgagagaatatgttaatggttaaggttatagtttgtatttttcgtggggttgtagagaaaatttttgtttttggaatttagaatgaagttaggttttgatttttgggtgatttatatttttattttatagatttgtttttaagagtgtgtaatttgtgtaattgtatagggtttgtattttaaagggtattatttttggtttaatgttttgtcgtttttttaaaatttttttgtattgggttatataaattatgaagttatttttatgaatttagatttttaatttattattttatttatttttgtttttttgatagtaaagttgattatttattgtaagatttggagtgaagggttggtttttagggttaagatagttggatttttttaagagttttttgaagatagaattaaggtaaaattgttaaaggggtttttaggtaggaggatgtttgtcgagagaaggttttaaattttattttatagtagttgttgggataagggaagttaggaggaaaggatttgaattttcgggttagataattttggtttaaattttggttgtgttttttatagtttgggtgattttaggaatgttttgaaatttttttgttttttttttgtaaaatgagggttataattatattaatttggaagatgatggggaagattaaatagataagatatataaagtgtttgaaatagtgttaggtaaaaaataaatgtttgataaagattagttattagatatttgggtttttgtttgagttttattatttattttaatgtgaatttaatatttgtgtgttttagtttttttatttgaataatgaggataatttgagtatttaatgtttggggatttaggagttgttattggtattagttttatattttttttttggagattttttttataggtttttttttgggtttttatattttttgtatttgttttcgttttagtatatgtgattcgtaagtagaaatggtttttacgtttatttttattttttttagttcggagtttattaaggtatgaagggggtttagttttgttggtgttagtagatagtgaaggatgaaggagtgaatagataaagggagttaggttttttatggaagttgtttatatttttaggtagtggttattatatatgggcgatcggttagagtggtggaagaaattttagggaaaggacgtaaatttttttgaaaggttagaaggttttgtatagtttcggggaagaataagtagaaggtagttgttttattttgaggtagagggtgaggagtaggtataaggaagtgtagggaaatttattttaaatgcgtttgtttatttatgttgttttaaaatcgattttttatttagtgtatgattgttttttgaaagggggaataataatgttaattattcgtagattgtgtttgttttaggtttttggtattatatttagttgtttttatgtgaaatatttgtgtttaagtattttttttatcgttattggttagaatttgaatgtgttttttttttttttagatttgttttttttgggaagatgtagaggtttatgatgtttttcgttatatcgggcgtttgtttgggtttgttggtagtggtagtagtggtagtagtaggtgttaattttgtttaacgggatatttatagtttgttgtttatttatcggcgttaaaagagagattggatttggaattagatgtatattgatgaagagaaaaatattttatttttttattatgtaggtaaggtaaggtttaagttttaggataggagaagttattagtagttggtttatagtgataagtggtggtggtgatggcgatggtggtaaaggtggtaatagatattgtggtggttgtaggagtggagatgataagggtgaaggtggtagtaatagtggtagaggtcgtggtggtagaagtagtggtggtaatggtagtaatggtggtggtagtgatagtgatggtggtgaggatggtatttggaaattttttgttttagttttttaatttttttgtaaatttggaattgttttaaaaaataaagtttagggaagaaaaattgaagggaaggaaaatagaaattggatatttatatgaaattgtatgtagaattttaattatatagatttaagttgattttttttttttattttttttgttttggtgggttttaatatatttatcgagagtttagttggaaggttattattttatttttattttgagtaatttatatagggttttaaattgtttttttttttttgagtttttattgttttcgtaggttataggttatagagttgaggtatggttttttgtttttagtttagttgtttattatgtattttggttattgggttttagtatttttttatgaatttatttgttttttgtacgttatagttttgttttaagatgtttgttgttgtttattttttttttattttgttcgattaagggggtaatttttattttttgtttttattttttttttttttagaattttttttaggttgtattatttaattttttattttattaatttttgttagtgtttttattgagggttttaatgattgtattgttgttaaattttggggatattttttagattttatgggatgtggttatattttttggaatttttttttttttttttgagattttagttttttttgagttttttggaggagtttagtttttttttttttttttttttttttttgagtttgagtttcgttttgttatttaggttggagtgtagtggcgtgattttggtttattgtaatttttgttttttaggtttaaatgattttttttttttagttttttaagtagttgagattatagttgggtgtgttattatatttagttaatttttttttttgtatttttaatagagatggggttttattatgttggttaggttggttttaaatttttgattttaagtgatttatttattttggatttttaaagtgttgggattataggtatgagttattatgtttttcgagttagttttttaatgagtttggtttattttagtttgggtaatagagttaaattttaaaaaataaataaataaataaataaaaaagtaatgttgtatttttttagtatgttagtttttgaggttgtaaatttagattttgagagttataatgggatttgtattttttgtatttttagtggggttttggtattttttaggtattaagttatattttttaattgaatagaattttattttggggatatattaattttttatgagagtattattgtatatgtatagaatattattttataggaattatatcgtttttaatattttttgtttttatgattttttaaatggagattttttaatttgtggttttattattgataattattagttagtatttatagaattttgtttggtgtaagatgttttatatatattattttttaaattttattttttgggatatgaatagtatatgttatatagaaaaatggttttgtggtttaagaagtatggaaaattttgagttatataaagtttattggagtttttttttgtagagttgtatattgtaaatttttaagaagagaatattttatgtattattttttgtattgggtttaggggtgtgttgatatatgtttgataattggttgtttaggggaaaagttttgatgcgtagtatttgttaatttttatggtgtaaatatttttattatgttttattttaagttattaatgtgatgttatcgaaggttaagataagataggagaagatttttatgagtatattattatgtagtatttttattatatagatattataaatatagataattttaaaatatagttaaaggtagtaaaataattcggaagcgatgaattttgagaattcgttgttttttatgatttatttaattgtaagtttatataatttaatttgtaatagtggttgtatttaataattagtttataaatatttttgaaaatttaagttggtttttgaaagttaagttgatataatttagcgttagtatattattggttaggattttatttttgcgtggaatagtagaagagtttagtgttttttagaatttatttttaaaagtgttgttttattttttagagtaaagtaatattagaagtaatatttttattttataaatgaggtaattaaaatttagagaggttaagtgatttttacggggtaaaaatattttttgttttttaatggtattaggtatattttttttatttaaaaaatgttttttaagtatttattttgtttaggtattattttaggtatgttggggttttgttaggtaatttatattatgagaataatttattggtgattagttagaggtttttttttttttttggttttttaaaaattttatttttaggggtatatgtttatgtttgttatacgtatattgtatattcgtggggattgggtttttagtatatttattatttaaatagtgaatattatggttaataggttatttgtttattttcgtttttattttaatttttttttttttggagtttttagtgtttattatttttatttttatggttatatgtattaattgtttagtttttatttataagtgagaatatgtggtattggatttgttgtttttgggttagtttatttaggtttatttaggattatggtttgtagttttatttatgttgttgtaaaggatatgattttatttttttttatggttgttagaggtttttgataaaaaattttagtattatatttagggattttggttagtattatatatattatatatatatatgtataggtatatttgtgtatatatatttttatttatatatttatatatagttattgtcgtttatttttagtttacgttatttttttttttttaga

SEQ ID NO: 50 - DNA, 8413 bp, Artificial Sequence
  chemically treated genomic DNA (Homo sapiens)
tttagaaaagaagaggtgacgtgagttgggaatgggcggtagtggttgtgtgtgagtgtgtgagtgagagtgtgtgtatataggtgtgtttgtgtatgtgtgtatgtggtgtgtgtggtgttggttagggtttttaaatatgatattgagattttttattaagaatttttggtagttataaaaaagaataaaattatgttttttgtagtaatatggatagagttgtaggttataattttaaatgaatttaagtgaattaatttagaagtaataaatttaatattatatatttttatttataagtaggagttaaataattggtatatatggttataaaaatggaaataatagatattggagattttaaaagaggggaggttgggatgagggcgagggtagataaataatttattggttataatgtttattatttgggtaatgggtatgttagaagtttaatttttacgaatatgtaatatacgtgtaataaatatggatatgtatttttgaaaataaaatttttaaaaagttaaaaaaaaaaaagaatttttgattagttattaatgagttgtttttatggtgtgagttgtttggtagagttttagtatgtttagaatggtgtttgaatagagtaggtgtttagaaaatattttttgagtggaaaaaatatatttggtgttattggaaggtaaaggatatttttgtttcgtagaagttatttaatttttttaagttttagttgttttatttgtaaaatggaaatattgtttttgatgttgttttgttttgaggagtagaatagtatttttgaagatgagttttgggaaatattgaatttttttgttgttttacgtaaagatggggttttagttagtggtgtgttggcgttggattgtattagtttggtttttaagaattagtttaaatttttaggaatatttgtgagttgattgttaaatatagttattattataaattaaattatatgaatttataattaaataaattatgaaaaataacgaatttttagaatttatcgttttcgaattgttttgttatttttgattgtgttttgaggttatttgtgtttatggtatttgtatgatggaaatgttatataatgatgtgtttatgaggatttttttttgttttgttttggttttcgatgatattatattgatagtttgaaatgagatatggtgagaatatttatattatggaaattggtaagtgttacgtattagaattttttttttggatagttagttgttaaatatatattagtatatttttgggtttagtatagaaaatggtgtataaaatattttttttttggagatttataatgtatagttttgtagaaaagaattttagtgagttttgtgtaatttaggattttttatattttttagattatagaattatttttttgtgtaatatgtattgtttatgttttaaggagtaagatttggaaaataatatatgtaaagtattttatattaaatagggttttataaatgttagttaataattattaataatagagttataggttagaggatttttatttaaagaattatagaaatagaaaatattaggaacggtatagtttttatagaatagtattttatgtatatataatgatatttttatagaaggttagtatgtttttaaaatagaattttatttaattaaaaaatataatttggtgtttgggaggtgttagggttttattaggagtatagagggtatagattttattgtggtttttaggatttaggtttgtagttttagaggttggtatgttgaggaagtgtaatattgtttttttgtttgtttgtttgtttgttttttggagtttagttttgttgtttaggttggagtggattaggtttattaaaaggttgattcggggggtatggtggtttatgtttgtaattttagtattttgggagtttaaggtgggtgaattatttgaggttagaagtttgagattagtttggttaatatggtgaaattttatttttattaaaaatataaaaaaaaaaattagttgggtgtggtggtatatttagttgtagttttagttatttgggaggttgagggaggaggattatttgagtttgggaggtagaggttgtagtgagttaagattacgttattgtattttagtttgggtgatagagcgagatttagatttaaaaaaaaaaaaaaaaaaaaaaaaaggttggatttttttagagaatttaagagaggttggggttttaagaaagaagagggagattttagagggtatggttatattttatgaggtttggaaagtgtttttagggtttagtagtagtgtagttattggagtttttagtgagggtattgataggggttgatagggtgggaagttagatgatgtagtttagggaagattttagaaggggaggaagtggagatagggagtgaggattgtttttttggtcgggtagggtgggagagaggtgggtagtaataagtattttggagtaaggttgtggcgtgtagggggtaggtgggtttatgaggaggtattaaggtttagtggttaggatgtatgatgaatagttggattagaggtaagaagttatgttttagttttgtaatttgtgatttgcgaggatagtggagatttaaagagaaggggatagtttggggttttgtgtgagttgtttaaggtgaggataagatggtggttttttaattgggttttcggtgagtgtgttaggatttattagggtagggaggatggagggaggaaattagtttggatttgtgtgattggagttttgtatataattttatgtgaatatttagtttttgttttttttttttttaattttttttttttagattttattttttagaatagttttagatttatagaaaaattgagaaattagggtagagagtttttagatgttatttttattattattattattattattattattattgttattattattattattatttttattattacgatttttattattattgttattatttttatttttattatttttatttttataattattataatatttattattatttttgttattatcgttattattattattatttgttattatgggttagttgttgatggttttttttgttttggggtttgagttttattttgtttatatgatggggaagtgaggtgtttttttttttattaatgtgtatttggttttaaatttaattttttttttggcgtcggtgggtgggtagtaggttgtgggtgtttcgttgggtagggttagtatttgttgttgttattgttgttattgttagtaggtttaggtaggcgttcgatgtggcgaggagtattatgagtttttgtatttttttaggaggaatagatttggggaaagaggagatatatttagattttggttagtgacgatgaaaggagtatttagatataggtattttatataagagtagttagatataatgttaaaagtttggggtaaatataatttgcgggtaattaatattattgtttttttttttagggagtagttatgtattggatgaaaggtcggttttaggataatatgagtaaataagcgtatttaagataaatttttttatatttttttgtatttattttttattttttgttttagggtagaatagttgttttttgtttattttttttcgaagttatgtaaaattttttgattttttaagaaggtttgcgttttttttttaaaattttttttattattttgatcgatcgtttatatatggtggttattgtttaagggtgtgagtagtttttatagggaatttaattttttttatttgtttatttttttattttttattgtttgttgatattagtagaattagattttttttatgttttgatgaatttcgaattggggagggtgaaaatagacgtggaaattatttttatttgcgagttatatgtgttaggacggaagtaagtgtaggggatatgggagtttagaggagggtttgtggggaaggtttttaggaagagggtgtgaggttgatgttaatggtagtttttaagtttttaggtattgggtgtttaggttatttttattgtttaaatgaggaaattgaggtatatagatgttaagtttatattggagtaagtggtgggatttagataggaatttaagtgtttgatagttaatttttattaagtatttattttttgtttggtattgttttaagtattttatatattttatttatttaattttttttattattttttaggttggtgtaattataatttttattttgtagaagaggaatagagaggttttagaatatttttgaaattatttaaattgtaaggagtatagttaggatttgaattaaggttgtttggttcggaagtttaaattttttttttttgattttttttgttttagtagttgttatggggtaagatttaaagttttttttcggtaaatatttttttgtttgaaagtttttttgataattttgttttgattttgtttttagaaggtttttaggaaaatttaattgttttaattttgagggttagttttttattttagattttatagtgagtggttagttttgttgttagaagagtaggggtgggtggggtggtgagttgagggtttgggtttataggaatggttttataatttgtgtggtttagtgtaaaagaattttaagaaggcgatagaatattaaattaaggatgatgttttttgaagtgtaagttttgtatagttgtataggttgtatatttttgaaggtaggtttgtggggtagggatgtggattatttagagattaaggtttggttttattttgaattttaggaataggggttttttttatagttttacgaggagtgtaggttgtgattttggttattagtatgtttttttagttttgattttatttttttattttttggggtttttgtgttattgatttgtaatttttgggatgatgtagaggaagaataggtgggtgggagagggaattaggatttatatacggagatagataaggatttataaggtgttggatgggatggtttttttttttgattgttttttgtttggttagagggagaggttggattttgtatattataagaggtttgtaaattttagtaatattttttttgatttgttggcgttaggttgattttagggagggttgagggtgtttgtgttgggttagttgatttttgggtttattgattttagtatcgacggtttttgttttttggtttttgtttttggttttggaggaagtggatttttagggtggggataggttttagaatgtaagtgttatatgtttgggagaggttttgatttttttgggttttagtttttttagttataaatgagggggttaatttggaagagatttgaggtttttgaagggatgttttaggtaggaggaaggcggtgaggaaaggtttggagaagaaaggaggtaggttgggagttttggttaggaagttggtttttgatttaggggaggcggtaggtatgatttttgttttagttttattggatttagattttgtggtttatttttttttttgtttagaaagaaagtgtaagttttgattttttttttttgttttaagtgagaagtgatttaaagatgataaagtaaaatggatagaagtgaaaacgagaaatagggagagggagagtttttagggttttgggtagaatagggtgagcgtttaggttttgagttgatagataggtgttgggtgtttattgtatgatgggttttatgttaggtaatgggggtgtcgtagtaagtaagatatatttttttggggagtttgtagtaatgggaataataggaaaataaataagttaatgaggaaacgtattagttggcgattagagatgtttagggaattataatgggaggtgttgtagagagtgagggggtagttggttgagtttgtgaggttaggaaggtttttgggagagcggacgttttagtttatatttgagtgttagttataggattgataggagagggaagggaattttaggtagaagtgtcgttgttggtttttgggtattttaatattcgagtttatttttgtgtaggtagtggttggtttttttaaaggagtttatttttttgaagtagtttttttataaaatttttttaattggttttttagggttcgttttgttttttgttgggaattttatttttaatatagtgagcgggaatgtggtttttttttttttggggtttattgggatgggttagtgatttttagggttgatcgtagttagcggttagatggataaatagagttatgtgttgtaaaatgattgtttggttaataatggattgtatatatgaatgtggttttttaaggttttaatggagttaaaaatttttttgttttagtaatattgtagttattgtgacgttatagtataagttattattcgtgtgtttggggtgatggtagtgtagattaattttataaaaaatgttatattaggttggtgtaaaagtaattgtgttttatttatttatttatttattatttttttttttgagatagagttttgttttggagtgtagcggtgtgattttagtttattgtaattttcgttttttaggtttaagttatttttttggtttagttttttaagtagttgggattataggcgcgtgatattacgttcggttaatttttttttgtatttttagtagagatggggttttattttgttggttaggttggttttaaatttttgattttaggcgattcgtcgcgttagttttttaaagtgttgggattgtaggtatgagttatcgtagtcggtggttttttttttttttagacggtaataatagtaattatttttgtattattttaatagtaaattaattttttattgacgaaagaaaaatatttttaagtaaatttagtgaagttaagtgtacggtgtttattaagtttatagtaggatatagtgacgttttaggttatttattatttattttttgatttatttagattaattattagttttggaagttttatttatggtatgtattatagagaggtgtattattttttatttttttatttttatttttattttttatttttttatttttttgagattgagtttttttttgtcgtttaggttggagtgtggtgtgaatgcggtttattgtagttttaaatttttgggtttaagtaatttttttattttagttttataaggaggtatgtgttagtatatttggttaatttttaaatttttttgaagagatagttggggtggaggggtttgattatatcgtttaagttggttttgaatttttgttttaagtgatttttttgtattggttttttaaagtgttgggattataggttttttttttattttttatatgggaattttattgtattttgtttgtatttagatatgtttagatatattaatatttgttgtcgtgttaaaattggttatagtatttagtatagtattatgttgtataggtatggagtttaagagtaatagattgtatcgtatagtttaggtgtgcggtaggttatacgatttagatttttttgtgtaagtatattttttgatgtttgtataatagcgaaattatttgaattcgttttttagaatgtgttttagttattaagatgtatattatatatcggggtttgtcgtggggtggggggagaggggagggatagtattaggagatatatttaatgtaaatgacgagttaatgggtgtagtatattaatatggtatatgtgtatatatgtaataaatttgtacgttgtgtatatgtattttagaatttaaagtatattaataaaaaataaataaataaaattaaataaagagaaaattttagggtgaagacggttaaaattaatatatttagaataaaatgaggttttttttttgatttgaaaaaaaaaaaaaaaaagatgtacggttgtatttatattagattttagtaaagtagagtttattagttataggttcggattacgtggtttttggggggatattaattttttagtgggttttgtttggttttatataataaagcgttttttgaaggtgtagaaaagttttttggattttgttttgtgtttagtaggggttttgttgttagttttggagagaagttttttggagtatatgggttatttttaagttttttttttttgatagggttgagattggttttcgtagagttattttatagtagttgtgtgttatttgttagggtagagggaggtttgggtgtttagtttttattagttagttgttggtgaggggtaggattttgggttgggggtatttggg

SEQ ID NO: 51 - DNA, 6227 bp, Artificial Sequence
  chemically treated genomic DNA (Homo sapiens)
  unsure (6203)
agtgagttgagatagcgttattgtattttagtttgggtgatagaggaagattttattttaaaaaaaaaaaaaaaaaaaaaaattagtttagtatggtggtgttgcgtgtttgtagttttagatattttcgggaggttgtggtgggggaatcgtttgaatttaggaggtagaggttgtggtgagtcgagattatgttaatgttttttagtttaggtgatagagcgagattttattttaaaaaaaaaaaaaaaaaaaaaaagggattttaattttattattttttttagtgtgtaaatgattgtttttttttttaaatattaaaattgttttttacgttttttatgtgtttattgttttttattttatgattatttatatttattttattgtttttttagagggtgtaatgtaagttttttgagagtagggaataatttattgtaatatttattagtattaggtatatattatgggtttaaatcgtagaagaattagtttaagttaaaaggatttttttgtataagttttagttattatagttataagttgaaattttttagatagttattataaaattttattttatattaatatattgttttttttgttttgttttgtttttttaagataggttttgtttggttttgttgtttaggttggagtgtagtggaacgattttggtttatttgtaatttttgtttttcgtttttaaatgatttttttattttagttttcgagtagttggaattataggtgtgcgttattatatttggttaatttttttattttttttgggtagagataggattttattatgttgtttaggttggttttgaatttttgggtttaagcgattttttcgttttggttttttaatgtgttgggattatatacgtgagttattatatttggttattggggttttttaattttaaatgttttgattagatgttaagttggttgttaaaatattataaatttgtagaatttttttgaaaattagtaagttaggaaagagtttaggaagtagtgtttgtttttaaagttttttagttgattttaatgtatagtcgagttgggaaattcgtggtattgatagtaattttttttttttttttttagacgaagtttcgtttttgttttttaggttggcgtgtaatggtacggtttcggtttattgtaatttgcgttttttgggtttaagtgatttttttgttttggttttttaagtagttgggattataggtggttgttattacgtttggttagtttttgtatttttagtagggacgaggttttattaggttggtttcgaattttttattttaggtgatttattcgtttcggttttttaaagtgttgggattataggcgtgagttatcgtgttcggttggtattgatatgtaattttaagtaggaatagagattataaattttttattaaagtaatttttaggttacgtatagtggtttatatttgtaattttagtattgtgggaagttaaggtgggtggattattttagtttaggagttaagattagtttggttaatatagagaaattttatttttataaaaaatataaaaaaaattagtcgggtgtggtggtgcgtttgtagttttagttatttaagaaggattatttatttaggattatttgagtttgaggaggttaagattgtagtaaattgcgttattgtattttaatttgggtaatagagagattttattttaataataataataataattttaaataaatggttataaatattgtaggagagaatagagtgattgttatttttaatatattgaaatatttaatttaatttataattaaaatattttttaagtagtgaagtagggtgagttggaaatttaattgaataagtttgtttttaattattattgattagtattaaaattatgttttagaaataagtgatgttggatatatttgggataggattatttatttatatattaatatatatttattatatatttaggatatagatatagtttttgttttgtttaaatttttattttagtaaatggagattggttaaaataaattatatatattgaagaaaatatattaataaaatttttattttgttttagaagatttttttagattgggtgtttaaggaaagtttttttaaggagataatatttgagtagagatttgaatgaaagataaggggttagttatggggaaatatttgggaagagtattttaggtagaaggttaatatatgtaaaaattgtgagatagataaaaatttatagatttttatagtagagtgaattttaatgtatgtaaatttaaaaaattatttaagagattagaggtttttcggatggaatatagattttgataaaagaatttaattgtttagaaaatatgtgaaataattttattaaagggggaaggggggtgttaagaaattttggaaatgaagtttataagattaaaggtaataggaattatatttaagtattgttttttatttgataaggtttttttttatgggaatacgtattttgaagttattatatttgtatatgtattttagatttgaataattaagtaaaaagatggtgaatgatgaaagttagttttttgtttgtagaagtgagaggtgatagataattaaaggaagaaggttagaatggatagagtggtaatggatagaattggaaatattaatttatgtttagtttaatatagatatagatgattgtatatagaaaaatttagtttagtatatatatatgtatattttttgtttagttagttgaaaggttttataagttataatattttagtagtaagtatatttaatgtttagaatttggtttttaatattattttttaataaaaagaattagggttttttggagaagtggttgattttaggattggggtcggaaatatataagatgtgtttagagaattttgtggttaaaaggataaaggaggttgggagtggtggtttatgtttgtaattttaatattttgggaagttaaggtgggaggattgtttgaggttaggagtttaatattagtttgggtaatatagtaagattttatttttattaagaaaaataaaggatagaggagttaattgaaaaagattttagtgattaaagttcgaataattttagtaataaaataaatacgtatgatataaatatatggttgaataaataaattggggagaatagaaaaatattttgtgtagaagaattttaagtaatttatatagatattttatttttatttttaaggaagtagaatataattttttatttttttttaggatgggttaggtatgatgatttttttttaaagagtatagaacggaaatagggtagggggattaatagtggagaaatttgattaacgttattgtagttaggtgattaaggttaaaatatcgatagtgataaagtatgttgagagtatttttgatttgatgtagtgaaaatcgtgttttatttttgtaatttttttgttaaaaatttataattttagttttaattatgagagaaatattaggtaaatattaattgagaaatattttataaaatatttgattggtatttttgaaaattgttaaggttattaaaaataataaaagtttaagaaattgttatagtttagaggaatttaagatgtgattattaaatggtatgtagtattttaaatgggattttggaatataaaaagagtattaggtaaaaattaagagaattagaataaagaaaggatttttgttaataatagtgtattaatattggtttattaattttgataagtgtattatattaataatgtaaggtgttaataagaaatatttagtatgagatttttaggaattttttatattatttttataattttttgttaatttaaattttttttaatgataagtttatttaaaaagtaaaataaaatttgaaggagggaggaaataagaagggaggaaatattggagatagaattagtttggtaagttgatagataaggtttgagaagtaggtaggggaaagattatttattttaggtaatatttttttattttatttgtataagaattatatgagttttattttttttttttttttttttttttttttttttttttttttttttttttttgtagagatgaagattttattatgttgaataggttggttttaaatttttggttttaagtaatttttttattttagttttttaaagtatgagttattatggtgggtttgtatgaaggaattttttaaaaaatgttataagtcgggtgtagtggtttattatttgtaattttagtattttgggaggttaaggtaagaggattatttgggtttagaagtttaagattattttgaataatatagtaagattttgttttttgtttaaaaaaaataaaaataagttgggcgtggtggattacgtttgtaattttagtattttgggaggttgaggtgggtagattatgaggttaggagttcgagattagattgattaatatggtgaaattttatttttattaaaaatataaaaattagttgggtacggtggtgtgcgtttgtgattttagttatttaggaggttgaggtaggagaatcgtttgaattcgggagacggaggttgtagtgagttgagaaagtagtgagttgagatagtattattgtgttttagtttgggagacggagtgagattttgttttaaaaaaattagtttgtttagttagagcgttttagcgtcgtgttcgggatatttcgttttgcggttagttttcgcgtgacgttatcgtatttcggtttcgtttttttcgtcgcggcgttcgtatcgtagtgatagttagtcgggttcggtgtcggagaggaagtgcggttcgcgttaagttcgttttcgtcgacgtcggtttttcgcggttcgggtgatagcgtcgcggtcgtcggacgtagcgcggggtaggcgcgggtagagtcgagcgtagcggaggtttcggcggaggcgcggggaaaatggttgatgattttggttttttttcgtcgtcggagagcggtgtttcggaggcggcggaggaggattcggcggtcgtttttttggtttagtaggagagcgagattgtaggtatagagaacgacgagggtttcggggtatttgtcggtagttatgcggttttcgcgtagtcgggttttacgagtgggggtgagttagcgcggggtttggagaggggtttagggcgcgtattcgggggatttcggtcggggtttaggggtatagggaagagagtttgttttaggttattcggggtaggagttgggagacgtggggaagaatttttttggagatttttatgtaggattttcgagttggggatgaggtttcgtttggggttgtggatttggtgattttcgggataggaattcggttatgatattttatttttaggttagtttttttattgttcggttttggaatttaattttattttagttttgagagttttttttgagttttttaatagtttgggtgttttaggtttttagttaagtgtgtaggtgtgggtagaatatagtttttttggttttttaggtttagtttttttttgtagttgggaaaaaagaggattttgggtgttttaggaatttattaatttttttcggtgatcgtttggtattcggtagtcgttgggttaagcgttttggttatatttaattattttatatacgtgattgaatttattttagagatggtaaaattgaggtttaagggagtatgttattgaaataattagtaagtggtagattaagaatttaaatttgttttttttttttttatatatatattttttttttttttttttttgagatggggtttcgttatgttgtttagattggttttgagtttttgggtttaagtaatttttttatttttgttttttaaagtgttgggattataggtgtgagttattatatttggtcgtgaatttaaatttgtttttgtcggatttgaagttttttttatttgattatattgtttattaagtgtttggttttgagttagatatcggagtgtgggttataaagaggtattagttagatgcggtagggttttttagggttttgtagtatgtcgaatttaattggtttttttttaaagggtgcgtttcggggtttattantgatttatttgtgtattgcgtttt

SEQ ID NO: 52 - DNA, 6227 bp, Artificial Sequence
  chemically treated genomic DNA (Homo sapiens)
  unsure (25)
gaagcgtaatgtataggtaaattantaataggtttcgggacgtattttttgggaaagagttagttaagttcgatatattataaaattttgaagggttttatcgtatttgattgatgtttttttgtggtttatatttcggtgtttaatttagagttagatatttggtaggtagtgtggttaggtggagagggttttaagttcgataggaataggtttaaatttacggttaggtgtggtgatttatatttgtaattttaatattttaggaggtagaggtgggaggattgtttgagtttaggagtttaagattagtttgggtaatatagcgagattttattttaaaaaaaggaaaagaaaaaatatatatgtaaaagaaaaagaaataggtttaaatttttgatttgttatttattagttattttaatagtatatttttttgagttttagttttattatttttgaaatgggtttaattacgtgtatgaagtgattaaatgtaattaaggcgtttagtttagcgattgtcgaatgttaggcggttatcggggaaggttagtgagtttttggagtatttaggattttttttttttttagttgtaggagagagttaagtttgaggggttaggagggttgtgttttgtttatatttgtatatttagttgggagtttgggatatttaggttattaggaggtttaggagggatttttaaaattgaggtggggttggattttagagtcgggtagtggggaagttggtttggggatgaaatgttatgatcgaatttttgtttcgggagttattagatttatagttttaggcgaggttttatttttagttcggaagttttatatggagatttttaagaagatttttttttacgttttttagtttttgtttcgggtggtttagagtaggtttttttttttgtgtttttgggtttcggtcggggtttttcgggtgcgcgttttgagtttttttttaggtttcgcgttgatttatttttattcgtggggttcggttgcgcgggggtcgtatggttgtcggtaggtgtttcgaagttttcgtcgttttttatgtttgtaatttcgtttttttgttgggttaggaaggcggtcgtcgggttttttttcgtcgttttcggggtatcgtttttcgacgacgagaagaagttaaagttattagttatttttttcgcgttttcgtcggagttttcgttgcgttcggttttgttcgcgtttgtttcgcgttgcgttcggcggtcgcgacgttgttattcgagtcgcggggagtcggcgtcggcggggacgggtttggcgcggatcgtatttttttttcggtatcgggttcggttggttgttattgcggtgcgggcgtcgcggcgggaggagcggagtcggaatgcggtgacgttacgcgggggttggtcgtagggcgggatgtttcgagtacggcgttgaggcgttttgattgggtaggttgatttttttgaaatagagttttatttcgttttttaggttagagtatagtggtgttattttagtttattgtttttttagtttattgtaattttcgtttttcgggtttaagcgatttttttgttttagttttttgagtagttgggattataggcgtatattatcgtgtttagttaatttttgtatttttagtagagatggggttttattatgttggttagtttggtttcgaatttttgattttatgatttgtttattttagttttttaaagtgttgggattataggcgtgatttattacgtttagtttgtttttgttttttttaagtagagaatagggttttgttatgttgtttaggatggttttgaatttttgggtttaagtgatttttttattttggttttttagaatgttgggattataggtaatgagttattgtattcggtttgtagtattttttaaaaagtttttttatataggtttattatggtggtttatgttttgggaggttgaggtgggaggattgtttgaggttaggagtttgagattagtttgtttaatatagtgaaatttttatttttataaaaaaaaaaaaaaaagaaaagaaagaaagaaaaaagaaagaaagaaaaatagggtttatatggtttttatataggtaaaatggaaaaatattgtttgaaatgaatgattttttttttgtttattttttagattttatttgttaatttgttaagttggttttgtttttaatgttttttttttttttgtttttttttttttttaagttttgttttattttttaaataaatttgttattaggagagatttagattaataggaaattgtgaagataatatagaaaatttttaaaaattttatgttgaatgttttttattaatattttgtattattagtatggtatatttgttaaaattgatgaattaatattgatatattattattaataaaagttttttttttattttgatttttttagtttttatttgatattttttttgtgttttaggattttatttagggtattatatgttatttagtagttatattttaggtttttttgggttgtgatagttttttgagtttttattgtttttggtgattttgatagtttttaggagtattagttaggtattttgtagaatattttttaattgatatttgtttaatgttttttttataattggggttgggattatgggtttttggtaggaagattatagaggtaaagtacgatttttattatattaaattaaaggtgtttttagtatgttttattattgtcgatgttttggttttgattatttagttgtagtagcgttggttaggtttttttattgttaatttttttgttttgttttcgttttgtattttttggaaggaagttattatgtttagtttattttgggaaggaatgaaaagttatgttttatttttttgaaggtaaaggtaaaatatttatataagttatttggaatttttttgtataggatatttttttattttttttagtttatttatttagttatgtatttatattatgcgtatttattttattgttaaaattgttcgagttttagttattgggattttttttagttgatttttttattttttgttttttttggtagagatgagattttgttgtgttgtttaggttagtattgaatttttggttttaagtagtttttttattttggttttttaaagtgttaggattataggtatgagttattatttttagttttttttatttttttgattataagattttttaggtatattttatatattttcggttttagttttagaattagttatttttttaaggagttttgattttttttattagagaatggtattagaaattaagttttaggtattgggtgtgtttgttattgggatgttgtggtttgtaggattttttagttgattgagtaagggatgtatatgtatgtatattaaattaagtttttttgtatgtagttatttgtatttatattaagttaaatatgagttgatgtttttaattttatttattattattttatttattttagttttttttttttggttatttgttattttttatttttatagatagaaaattggtttttattatttattatttttttatttaattgtttaaatttgggatatatatgtagatatagtggttttagaatacgtatttttatggagaaaaattttattaagtagagaatagtgtttaagtgtagtttttgttgtttttagttttatagattttatttttaaagttttttagtattttttttttttttttggtgaggttgttttatatattttttagataattagatttttttgttaaagtttgtgttttattcggagagtttttgattttttaaatgattttttaaatttatatatattaaggtttattttgttgtaaaggtttgtgggtttttatttgttttatagtttttgtatatgttggttttttgtttggaatattttttttagatatttttttatgattggttttttattttttatttagatttttgtttaaatattatttttttgaggaagttttttttgagtatttaatttaaaggaattttttagaataaaatgaaaattttgttagtgtattttttttagtatgtgtggtttgttttgattagtttttatttattaggatgaaaatttaaatagggtagggattgtatttgtattttggatatatagtgaatgtatgttgatatatgaatgaataattttgttttaggtgtgtttagtattatttatttttagggtatagttttagtattgattagtagtaattgaaagtaggtttgtttagttgggtttttagtttattttgttttattatttaaaaagtgttttggttataaattaggttaagtgttttagtatattaaagatggtagttattttgtttttttttgtaatgtttataattatttatttaaggttattattattattattgagatgaggtttttttgttgtttaagttggagtgtagtggcgtagtttattgtagttttgatttttttaggtttaggtgattttgaatagatgattttttttgagtagttgggattataggcgtattattatattcggttaattttttttgtattttttatagagatggagtttttttatattggttaggttggttttaatttttgggttgaagtgatttatttattttggttttttatagtgttaggattgtaggtgtgagttattgtgcgtagtttaaaagttattttagtgagggatttataatttttatttttatttagaattatatattaatattagtcgggtacggtggtttacgtttgtaattttaatattttgggaggtcgaggcgggtggattatttgaggtgaggagttcgagattagtttggtgaaatttcgtttttattaaaaatataaaaattagttaggcgtggtggtagttatttgtaattttagttatttggggagttaaggtaggagaattatttgaatttaggaggcgtaggttgtagtgagtcgagatcgtgttattgtacgttagtttgggggataagagcgagatttcgtttaaaaaaaaaaaaaaagaattattattaatattacggattttttagttcggttgtatattagaattagttgaggagttttaagaataaatattgttttttgagtttttttttgatttattgatttttaggaaaattttataaatttgtaatgttttaataattagtttggtatttagttagaatatttgaagttaaaaaattttagtaattaggtatggtggtttacgtgtataattttaatatattgggaggttaaggcgggaggatcgtttgagtttaggagtttaaggttagtttgggtaatatggtgaaattttgtttttatttaagaaaaatagaaaaattagttaagtgtggtggcgtatatttgtggttttagttgttcggaggttgagatgggaggattatttgagagcgggagatagaggttgtaagtgagttaagatcgttttattgtattttagtttggataatagagttagatagaatttgttttaaaaaaataaagtaaaataaaaaaaatagtgtattaatgtaaagtgagattttgtgataattatttagaggattttagtttatagttatgatgattgaagtttatataaaaaggtttttttaatttggattgatttttttacgatttaagtttatagtgtgtgtttggtattagtgaatattatagtgaattgttttttgtttttagagaatttatattatattttttgagaaggtaatagaatgaatgtaaataattataagataggaaataataggtatataagagacgtagaaaataattttggtatttagaggagggagtagttatttgtatattggggaagatggtaagattagagtttttttttttttttttttttttttttgagatggagtttcgttttgttatttaggttggagggtattggtatgatttcggtttattataatttttgttttttgggtttaagcgatttttttattatagtttttcgagagtatttgggattataggtacgtagtattattatgttgaattaatttttttttttttttttttttttgagatggagtttttttttgttatttaggttggagtgtagtggcgttattttagtttatt

SEQ ID NO: 53 - DNA, 5682 bp, Artificial Sequence
  chemically treated genomic DNA (Homo sapiens)
  unsure (3955)
tttagatgtgaggtatagataggtatattatatattttggtagtatagaggaaggtattaggtatgatgtaatggtaagggagattttttggaggaatgttgtttggttagtttaatagaggtgttaagattttaagtattagttttattgttagtaagttatgtggtttggggttagttttttaatttttttaaatattagttggtttatttgtaatgagggtgataatatttgtttatagttttgtattttttggtttttaagaaattgtataatttttttttttttttattatttttttttttttttttttttgttatttgtattttttaacgtggggttttttaagttttatattttgggtttttttatttttatatgttatgtttttttggtttaaattttgtttgtagttatatttttatttattttattttaattttgttttcgttttaatcgtatgttggatatttttacgtagatattttgttaaggtatttgaaatttaataagtgtaaagttgaatatggatagtttttttaaatagggttgttaattttataaattttaaattttcgagttttttttaatatttttttttttattgttttttatttaattagttgttaaattttgtggtttattattttgaaatttgtttggttagagtaggaatggaaatttaaaagtttataataattgtgttaggagttttatagagtaataggattggaattttttaatatagatttattaattttaaaattaaaagatatttttgttttttaaatatttggattgttgtaattagttaaattggatttttgtttatatagttatttttattttagtattttagatgtaaattttaaattatttaggtgttttttttttataagtgttaatcgttttttaatgtttttgaatggtgtaaaaggtataggttttgtttttaaggtttttttaaatttttttttagttttttttatttttttgttttattgttattgttttaatttagttttttatattttttttaaattaaattttttattatttttggaattaataggattgattttaaatttttgttcgtattttatttttttttttatttttgttttattgtattgatatttgttatatttagttgaattattgggtttttagtttttttcgttttaattattatattttttttttttttttttgaagttttatattattttggttgtgatatttgtatagtatttattatggaaaatttttttattagattgtagatttttaaatataagtattgatatttagtgggtttttgtatattagggaagtttattaaatagtttttgatttagttattgtatggtttttgggataagagtaagaatcgtggttttttgttttgttaaaattataaatttattttttttgtattttgatttaattatataagtttgttttggattggaaggtttatagagattattttagtgttaaatgttatttaattaatgtagaaataagtttttgagaggtgtagtgatttagttgaggatatattgatagtttttggtagataagtatgaagttttggaattattttttatattataagtttttgggtttttaaattatttttttaagtatttaatttattattttttgtatataagaaatttttgtttattttaataaaaagaatgtagtacggtaggataggagaagtataggttttggaattaaattaggtttagattttgatttggtcgttagttagtgtatgggttttggtaaatagttttttagtttgtttttttgtttgtaaaatatggatagttatttttattttatgaagttgtgttggtgaaatggtataatgtgtataaagtaattggaatataataaatgaggttatttatttaaaataatttttagtaagttataaatttatatatttgtttttttttgaggaatgtttagattttattatagattttttttttaaattgagtaaatatatagtggatttttttgtttttttttttttagaatgttgaaatttggttgattgtaattattatttaagattttatttagtaattgttcgtaaaattttttttttttttttttttttgagacggagttttgttttcgttttttaggttggagtgtaatggcgcgattttggtttattgtaattttcgttttttaggtttaagtgattttttcgttttagttttttaagtagttgggattataggtatttgttataacgtttagttaatttttgtatttttagtagagacggggttttattatgttggttaggttagtttggaatttttgattttaggtgatttttttgttttggttttttaaagtgttgagattataggcgtgagttattacgttcggttaaaatttttttttaaaaaaagttattgttaataattaagtatgttggaaggtgaatgtttaggatatttagtgttattgagttgtgtgatagagataatatttttgatattttgtagagtttattgttttttttttatataaagttatgatatttatataataaatatgtagagagttttaatagattttaatgttaagttttttaatagttgtataattggttttgtttgaatttgttttttttataatgttattttgttttttatattaattttgtgagtttaagtaggaatgaagattatttatttttaatggtaggatagaagggagtggtggttaaggttattggaggttattgggggaataaatgaagattttatgttatttttaaatattgttaggatttaatatattttgtgtttttatatttaatatgggagtaaaggttagatattttaatattaaatatgaggatgatattagatggttttaaaagttttttattataatttttaaattttataatgttcgaatattgttaggttttagtgaaattttatagtagttttttgtttggaattattgtaggattggttttagtaatgggtaatataaggtttggttttatatagtaggtatgggttaaagaaaatgttatgattgaaaaattgttgtttttttttttaaaaagtttatattaattaggaaagagttattagaaaatttttaggaaagaatataatgataggatataataaatatttttatagttggtttatagattaaagtataattttaagtagggaattttatttaacgaggtaaggtatttaagggaaaaggaatttaggttaggattttgttagttagatttagataaattattatagggaagtatgtttttgaggttattttttatgaagaagggtaatttattttgttatttatattttttttgttttcgataggggtggttttaagttggatagatttttattttgattagtattatataggtttgtggtttttaaatttggttgtatagtgtggtattttaagtaattttgatatttagttttatttttaaagatgttgatttaatttgtttaaggtgtagtttgggtttttggattggaattaatttatatatttattaatgatagattggataaagaaaatgtggtatatatatattatagaatattatatagttataaaaaaggatgagtttatgttttatgtagggatatggatgaagttggaaattattaattttagtaaattaatataagattagaaaattaaatattgtatgtttttatttataagtgggagttgaataatgagaatatatagatatagggaggggaatattatatacgggggtttgttggagggtgggggttaggggagggatagtattaggagaaatatttaatgtagatgttgggttgatgggtgtagtaaattattatggtacgtgtatatttatgtaataaattgtatgttttgtatatgtattttagaatttanagaatatatatttatatatgtataaatatatatgaatatataaatataaatatatatataagttttttacgtgattttaatgtgtggttagttttgtaaattttaggttatttattttaaagggtttgtaataagttttttttttaaaatttattttattattatttagcgttttggggtttgtttgtttttattgttattttattttatatcgtttcgaggcgcgcgcgcgcgcgcgtatatatatatatatatatatatatatatatatatatacgtatattggtgaatttttttttatagttagtttggagtaattttaaagtggtgtttttcgtaaataaggagaattcgggtgaagaaaatgatttttattcgaataaggtatgaataatgtttattttttattgtgttatttaatttgtttttttaggtttttgtttttatattagagagtgttttaggagatgacgttttttttttttagttatttttttattttcgtgttggtttttgatagattttttagtagagggtttaagacgcgggtagagtatcgcgttttagcgtttgagttttagttttcgaattttatcgtatttgtaggtttttttggtagtatttaagcgcggggatgtttcgtttagacgaatttacgtgcgggtagtaaggtttgcgatatttgagtatttttttttttttttcgtttatatttcgtttgtgtttacgtagcgaggagatatttaggtttttagaaggtaggttatcgtaggttttatttagtagtggagagagtgagttttagagggtgttgttagcgagtttttttttttttttttttttatttttttcgagtttagggttttcggggcgtatgacgtcggagttttttgatcgtatttttgattataataaatttttattttattcgttttgtttgttttatttttggtgacgtagagttttagtttagatttcgtttaaagtatttatttaattggtattgcggagttacgaggtttttgtttattgtaattcgtttcggtcgttgggcgtagttgcgattcggcggagtttcggcggcgcgtttttgttttaattcggcgcgttatgatcgtcgcgcggtcgagcgtgttcgcggcgttgttttttttcggggagttgtttcggttgttgttgttggtgttgttgtgtttgtcggtcgtgtggggtgagtaggggttcggcggtcggggaagtttttgggttgggtgggaggtttaagtcggtttttgagatacgtataggggtcggcgatttggtaggtggggagtttggttcgcggtcgtggttttcgtcgttttgtgtttttaaggttttcgtcgtttattagtatttggggtttttgttgtgtcggtttttagttgatttggttttaggggtcggcgtggagggttaaagaggtttcggttgggtttgcggagtagttaagtttggtaaaatcgaaagggagggtttaaagagattgtatttttaatttttaaaaagttggtttaaaaggatgggaggttagatcgttgatcgttttttattttcgatagagtttagtcgtgtggagtatacgatgttgtaaatttgtatgttattttttttaggtgtggtattttaagggggtttgtgttttgaaaatagtaattgtgaggatatttgatagttattttttttagttttgtttttgtttttttagg

SEQ ID NO: 54 - DNA, 5682 bp, Artificial Sequence
  chemically treated genomic DNA (Homo sapiens)
  unsure (1728)
tttagggagataaaagtagaattgaaggaaatgattattaagtgtttttatagttgttgtttttaagatataagtttttttgaaatgttatatttgaaagagatgatatgtaagtttgtagtatcgtgtgttttatacggttggattttgtcgagagtggggaacggttagcggtttggttttttatttttttagattagttttttgggggttaaggatatagtttttttgagttttttttttcgattttgttaggtttggttgtttcgtaaatttagtcggggtttttttaattttttacgtcgatttttaaagttaagttagttgggggtcgatatagtaggagttttaaatgttggtgagcggcgagagttttaaaggtataggacggcgggaattacgatcgcgggttaagttttttatttgttaagtcgtcggtttttgtgcgtgttttagagatcgatttggattttttatttagtttaggggttttttcggtcgtcgggtttttatttattttatacggtcggtaggtataatagtattagtagtagtagtcggggtagtttttcgaggaggggtagcgtcgcgggtacgttcggtcgcgcgacggttatggcgcgtcgggttagaataaggacgcgtcgtcgggatttcgtcgagtcgtagttacgtttagcggtcggagcgagttgtagtaagtagaagtttcgtggtttcgtaatattagttaaatgagtgttttgggcggggtttgggttggggttttgcgttattaagggtgggataaataagacgggtggagtaggggtttgttgtggttagaggtgcggttagagggtttcggcgttatacgtttcgggggttttagattcggggagagtggggaggggaaggaggaggagttcgttggtaatattttttgggatttattttttttattgttgggtggggtttgcgatgatttgttttttagaaatttaaatattttttcgttacgtaaatataaacggggtgtaaacgggagagggggaggggtgtttaagtatcgtaggttttgttgttcgtacgtgagttcgtttaagcggagtattttcgcgtttgagtgttgttaaggggatttgtaggtgcggtggagttcgggggttgagatttaggcgttgagacgcggtgttttattcgcgttttgggttttttattgggaggtttgttaaaggttagtacgagggtggggaaataattaaggaggaagggcgttattttttagaatattttttaatgtgaaaatagagatttggggaaataggttgaataatatagtagggagtgaatattgtttatgttttgttcgggtgggagttattttttttattcgggttttttttatttacgaaagatattattttgggattattttagattgattgtagagagaaatttattagtgtgcgtgtgtgtatgtgtgtgtgtgtgtgtgtgtgtgtgtgtgcgcgcgcgcgcgcgcgtttcggggcggtgtggggtgggataataataaaaataaatagattttaaaacgttgaatggtggtggggtggattttaagaggaaggtttgttataaattttttagaataaatagtttgaggtttgtaagattggttatatattagaattacgtggggagtttatatatatatttatatttatatatttatatatatttatatatatataaatatatattttntaagttttggaatatatgtgtagaatatgtagtttgttatataggtatatacgtgttatggtggtttgttgtatttattaatttaatatttatattaggtattttttttaatgttattttttttttaatttttattttttaataggttttcgtgtgtgatgtttttttttttgtgtttgtgtatttttattgtttaatttttatttatgagtaagaatatgtagtgtttggttttttggttttatgttagtttgttgaggttgatggtttttagttttatttatgtttttgtataggatatgaatttatttttttttatggttgtgtagtattttatggtgtatatgtgttatattttttttatttagtttattattgatgggtatatgggttggttttaatttagaggtttaaattgtattttagataaattaaattagtatttttggggatgggattgggtattaggattatttaaagtgttatattgtgtagttaggtttgagaattatagatttatatggtattggttagagtaaagatttatttagtttaggattatttttgtcgaaaatagaaaggatatagatggtaaggtgggttgtttttttttatagagaatagttttaagaatatgtttttttgtaataatttatttgggtttggttagtagagttttagtttagatttttttttttttaaatgttttatttcgttaagtgaaattttttatttggaattatattttggtttatggattagttgtgggggtatttgttatattttattattatatttttttttgaaggttttttgatagtttttttttggttggtatgagttttttgaggaggaaaatagtaattttttaattatagtattttttttgatttatatttattgtatagaattaaattttgtgttgtttattgttggagttaattttatagtgattttaagtaagggattattgtaggattttattgaaatttaataatattcgaatattgtggagtttagaagttatggtggggggtttttaaaattatttagtgttatttttatatttgatgttaaaatatttaatttttatttttatattggatataaaaatataaggtatgttaggttttggtagtgtttagaagtggtatgaggtttttatttatttttttaataatttttagtaattttaattattatttttttttgttttgttattagagataggtaatttttatttttgtttgggtttatagaattggtgtgaaaggtaaggtagtattatgaaaaagataggtttaagtaagattagttatgtagttgttagaagatttaatattgaagtttgttaaagttttttatatgtttattatgtgaatgttatagttttatatggagagaaaataatgagttttgtaaagtgttaaaaatattatttttattatatagtttagtgatattaaatgttttaagtatttattttttagtatatttagttattggtaataattttttttaaaaggaaattttggtcgggcgtggtggtttacgtttgtaattttagtattttgggaggttaaggtaggaggattatttgaggttaggagttttagattagtttggttaatatggtgaaatttcgtttttattaaaaatataaaaattggttgggcgttgtggtaggtgtttgtaattttagttatttgggaggttgaggcgggagaattatttgaatttgggaggcggaggttgtagtgagttaagatcgcgttattgtattttagtttgggggacgagagtaaaatttcgttttaaaaaaaaaaaaagaaaagaaattttacgaataattattggatagagttttaagtaatagttataattagttaaattttaatattttgaggggaaggaaataaagaaatttattatgtatttatttaatttagaaaagagatttatgataaaatttaagtattttttagaaaaaagtaaatatgtgaatttataatttattaaagattattttaaataaatggttttatttgttgtgttttagttgttttatatatattatattattttattaatataattttatgaagtgaagataattatttatattttgtagataaggaaataggttgagaggttgtttattaaagtttatgtattaattagcgattaggttagaatttaaatttagtttgattttaaaatttgtattttttttgttttgtcgtattatattttttttattggaatgagtaaaaattttttgtatgtagaggatgatgaattaggtatttggggaggtgatttgggaatttaggggtttatgatatgagaagtagttttaaggttttatatttatttattagaaattattagtgtgtttttagttgagttattgtattttttaagggtttatttttgtattgattaaatagtatttggtattaaaatagtttttatagattttttaatttaaaataagtttatgtaattaagttaaaatataaagaaaataggtttatgattttgatagagtaagggattacggtttttatttttattttaggaattatataatgattaaattaaagattgtttaataaatttttttagtatatagaaatttattaagtgttaatatttgtgtttgagaatttataatttagtagggaggttttttatgataaatgttatataaatattataattaaagtggtatggggttttagaaaggaaagaagggagtgtggtaattggagcggggaaggttaaaggtttagtgatttaattaaatatgataagtgttaatgtaatagggtaaaaataggaaaagagatgagatacgaataaaggtttggggttagttttgttgattttaggaatagtaaggagtttagtttagggagagtatggagaattgaattgaggtaatggtaatggaataagagggtaagagaggttggaaagagatttgagagagttttaaaggtaaggtttgtgttttttatattatttagaagtattaaaggacggttgatatttgtaaggaggaagtatttgggtaatttggaatttgtatttaagatgttggaatgggaatggttgtgtaagtaaagatttaatttagttaattataatagtttaggtgtttagagaataaaaatgttttttagttttaaaattaataaatttatattaaggagttttagttttgttgttttgtaaaatttttgatataattattatagatttttgaatttttatttttgttttgattaaataagttttaaagtaataagttatagaatttggtaattgattagataaggaatagtggggaaaaagatgttgaagaggattcggaagtttggagtttgtgagattagtagttttatttaaaagaattatttatatttagttttatatttgttgaattttaaatgttttggtagagtgtttacgtggaaatgtttagtatgcgattgaaacggaggtaagattgaggtggagtgggtagagatgtgattgtaggtaaggtttgaattaagggagtatagtatgtggaaatagagaagtttaaggtgtgagatttgaggagttttacgttagaaagtataaatgatagagaaagggaaaggagaaggtagtggaaaggaaagaggattgtgtaattttttgaaagttaaggaatataaaattgtgagtaaatattattatttttattgtaagtgaattagttggtgtttagggaagttaagaaattagttttaaattatatggtttgttggtagtagaattagtgtttaggattttaatatttttgttagattggttaggtaatatttttttagaaaattttttttgttattgtattatatttggtatttttttttatgttattaaagtatgtaatgtgtttatttatgttttatatttgag

SEQ ID NO: 55 - DNA, 5572 bp, Artificial Sequence
  chemically treated genomic DNA (Homo sapiens)
gagtttaagttattgttttagagaagtaagttttatgttttggtagtttatatgtggtgttgggtatgtgggtgtatagaaattaagaattgaggtttgggaatttatgtttagattttagaggatgaatggaaatttttagatgtttaagtagaggtgtattataggagtagaattattatggagaatttttattagggtagtgtagaagggaaatgtgggatatgagtttttatatagagtttttattggggtattgtttagtggagttgtgagaagagggttattattttttagtttttagaatggtagatttagggatagtttgtttcgtgtaattggaaaagttatatatatttaacgttagtttgtgaaagtagttaggagggggtttgaattttgtaaaattataggggtagagttgtttaagattatggtaatttattttttgtattagtatgatttggatgtgagatatggagttaaaggagataattttggagttttaagatttgattgatttgttggattttagatttgtatggtatttgtagtttttttattttggttaattttttttatttggaatggttgtatttatttaatatttataattttattatatttaggaagtaattaatttgttagtgattttatagagtcgtaggtagaagggatttgttttgttttagatgaaattttggattgtggatttttgagttaatgttgaaatgagttaagatttgggggattgttagtatggtatgattggttttgaagtgtgaggatatgagatttgggagggattagggatggaatgatatggtttggttgtgtttttatttaaattttattttgaattatagtttttatgatttttatgtattgtgggagggatttagtgggaggtaattgaattatgggggtaggttttttttgtgttgtatttgtgatagtgaataagttttataagatttgatgattttataaaggggagtttttttatataagtttttttgtttgttattatgtaagatatgattttattttttattcgtttttaggcgtgattgtgaggtatttttagtatgtggaagtgtgagttaattaagttttttttttttataaattatttagttttaggtatgtttttattaatagtatgagaatagatgaatatatattgtaagtttttttttggtttgtagttgttatttttttttatgtttttttatatggtttttattttgtttttttttgtatttaaattttttttttttataaagttattagttatattggattggggtttattttagtgattttattttaaattgattaattaggtcgtggagatacgtgaaggttggtgcggagttcgtttttgtaagtatggttgttttgggatggattttttttgttttttttttgcggcgggtttgggtgtagtggattcgtagttgtagtatttttattgaggtagagatttaaaagtagcgtttttagtagttggtgtattagatgattgaattttgttgggagaagtgtatggataagtttgggttaaagttggatagtcgggttgaggtttgttttgtgaattgtattgagcgttttattgatataagttagtttattttgaattgattgtaatagatttagaaatttaagttagtttttttagaaagtttttttgattgattttagtattatttttttggaaaaggaaggtagtttaataaatgaagagttgttgatgggatgattgaagaaatagttatgagaggattggtttttattttttgttatttttgggatattttgttatttgagaatgaataaagattaattttttgtgtgtgaagtttaagggttatatgtttgtttgtattttttaatgttaattttgtgaaaataattgataggtgaatggaaaattttatttagatgtatattattgtatacgggattatgttttttttaaagttttattaattgttttttattattttgatagtgggattatatatataaaaattttttatttgtgtggagttatttcgattttaagggagatttttgtgttttttagaaagggtagaagtgggggaagaataatttagtatttttatttagtgtttgattattaatgttggagaaaaatatttgtaagagtgtttatatagtatattttagtttttttgatgattttttttttttatatgatgatttgtttaaatatttatattaagtatagttttaaggtaaggtaggtagtttgagagtttagaggtttttagttttaaaggaatttagttagtgaatataatttttattattagattgttataaggaagaaattaatttattttgtatattagggtataaaaaatttaatgatgtgtttaaataagttataaagatttaggttaattataagttaatagtagttttaggtagaggtgtatgtttaatgttaattagtgtagattttatttattgtatttttttgattattgaaataaaagttatataagatttaaaaaaattgattaattttgtaaagattttatatttaaataatgttatattttgaagttttaaaggttgggattttaatatattttttggagggatataatttaatttataatattaagtaattgtataatttagttattttaataaattgagtgttgtttaatttattatatgataaaattgggtatttgtaggagtatgttattattaagcgaaaattgtatttatatgataaaggagataagtttattaggtttataaggtataagaaatttagattagtagaaaatttagattttatgatgtttgtttttattgatttaatgttttttttttagtgtatatttatagttttataaggagttttttataattaggtaatagatgagggaaaggagttaatgttatgtaaagtaagttggtattagtaataagtagatggttgttgtattagagttttttttagggatgttttgaaatatagtagaaagggaaattttattgataaatagaattttgagtagaatatttgtttttttattttgtaagaaaaaagagatggtttaatgtaagatttatattgatttattagtggtggttaatgtgttggttagttgttattttaaggatttggaaaaaataagattgaaagattggtgatatagaggttaaggtgggggaggtatgtgagagagttttttgaaatgggtatagggtgtgaagatatttgcgttttatggagtgttttttagagaataaattgatttgtttcgtagatgttagttagttttttgttagtttttttggggtttgttgaatgtataatgagtgttatggtgttggtatggagatgaagtataggtttaattttttagattttttttatcgaggttgatgtggtttattaatgttgagtgagtaaaatgttgagagtgaagggtagtattgagttttttgtggtattatttttcgtagttcgtgttaaatggtttttttttatagtattagtttatagggtttagtaatattattgatttattttttttagtagttggaagagggaggaggagagttagttttagtttttggagttgggggtgagtgaggatattgatgtattataagtaattagtgggtaagggggaaaagatgattgagtttaaaagtaatgtttggattggaaataaaagatggaaaattgtattaatttataattatgtggtaatgttttatcggattttgtatttttaattttttatttttattgatagagaggttttgttttttagttgttgtgaataagttgaagaggttttatttttttatttgtaagagtggaagtaattatagggggttttaaaggtaaatgtttatttgtgtattttatcgtgaaagtgttaagggtttagattttattttttttgttttattttatttttagtatttagaagggaggttggtatattgtaattatttaaatatttgtggatgattggaataaatgggaggatgtaggaatgaatgaacgaatgaataattttttagggaataatagagagttgggggagggagaagttatatttgattttttatttttttttaaaatttttgaaaagattatgagaggtcgtatagagtagttattaagattttgaatttttaatttaggatttataattttttagttgaatggtttggttaagttatttattttttgtgtatagtttttttttttgtaaaataaatatagtaaatgtttagagtagtatttgggaaaaagttaagttttatataagtgttattgttattatttttgttattttgatgagtgtgtaagtttgtaagataatcgggaaattttttagggagggtgaatttagatatttagtttttaagggttatttaagagggaataattattttttttttttgttttttatattgttttagattttttattgttttttaatataatttttattggtaagagacggagttttgggttttagttttagttgtttgcggtgggttgtgtgagtttgttaaagttttttgttttttttgggtttcggttttttcgtttgtttacgtgaggttggaggagttgaacgtcgacgttatttttagttaagagggagtagggttttcgagtcgtcggtttagggtttgcgtattcgaggtcgcgcgttttttttttttttttacggttttttcgggtttcgtattttgcgtttcggttgtcgtttagcgttttatatcgtttttagggggttttcgcgggtttttttcggtcgggatgttagtgtttcgcgttacgcgcgtttgttttcgcgtcgtttgttttgtagtttgttcgcggcgtttttatatttagcgggttcggcgtttattaatgtttaattcggggtcgaaatttgttagcggcgagtgattttatcgttcggagtagcggtgtaggacgcgcgttttcgtcgttcgcggtgatttttgtttgcgttttttttttgaacgtttattttcgaggagacgtcgacgatgaaggtgagtgtcgcgttacgtacgttttcggggcgagttgtggggattttttcgttaaattttttaaatggtttaaaagttggcgaaatcggattagggattttttttaggcggaagttttaaggttattttttgataggtgaagggacgttttagagttttcgtttagttttcggattttggtttttgttaggattttggcgtcgagttttgaatgtttcggagagttatttatagaacgtacgttcgaattcgggtaggggtagagaaattaacgttaatgtgttttgaaggtataagtttaagggtattcgttttagagaattttaattggcgtattttagacgttatttttatttttagttcgcggttttttttttttaacgtatttttatttgtaaattttgttgtttttggagtagtttcgatttttttacggaaattggggttatacgtttttttttaattggatttgatttgttcggtttgtaga

SEQ ID NO: 56 - DNA, 5572 bp, Artificial Sequence
  chemically treated genomic DNA (Homo sapiens)
tttgtaagtcgagtagattaagtttaattagagggaagcgtgtggttttagttttcgtaggagggtcggggttgttttagaggtagtaggatttgtaggtgggagtgcgttagaagagggagatcgcgggttgggggtgggggtggcgtttggagtgcgttagttggagttttttaaggcgggtgtttttgaatttgtgtttttagagtatattagcgttggtttttttatttttgttcgggttcgggcgtgcgttttgtgagtggtttttcgggatatttaaagttcgacgttagggttttagtagaagttagggttcgaaagttaagcgagagttttgggacgtttttttatttgttagagggtggttttggggttttcgtttaaggggagtttttggttcggtttcgttagtttttgggttatttggggagtttggcgaagaggtttttatagttcgtttcggggacgtacgtggcgcggtatttatttttatcgtcggcgttttttcggaagtgagcgtttagagaaggagcgtaggtagaagttatcgcgggcggcggagacgcgcgttttgtatcgttgtttcgggcggtggagttattcgtcgttggtaagtttcggtttcgagttaaatattagtgagcgtcgagttcgttgggtataaaggcgtcgcgggtaggttgtagggtaggcggcgcgggagtaggcgcgcgtggcgcggggtattggtatttcggtcggggggagttcgcgagggttttttgagggcggtgtagggcgttgggcggtagtcggggcgtagagtgcggggttcggaggagtcgtgggggaggggaaagggcgcgcggtttcggatgcgtagattttgggtcggcgattcggggattttgtttttttttagttaaaaatgacgtcggcgtttagtttttttaattttacgtggataggcgagggaatcgagatttagagagggtaggggattttggtaaatttatatagtttatcgtaggtaattggaattgaaatttaggatttcgttttttgttagtgaaagttatgttaggaagtagtgaggggtttaaagtagtatgaaaggtaaagagaaaaggtgattgtttttttttgaatggtttttggaagttgagtatttggatttattttttttagggaatttttcgattgttttgtaggtttatatatttattaagatgataaaaataatgatagtaatatttatgtggaatttgatttttttttaggtgttgttttaagtatttattgtgtttgttttataggaaggaagattgtatatagagaataaataatttggttaagttatttagttaggaagttgtagattttaaattaagagtttaaggttttaatggttattttatgcggttttttatagtttttttaagggttttggagaagaataaaagattaggtatggttttttttttttttagttttttattgttttttaaaggattatttattcgtttatttatttttatatttttttatttattttagttatttatagatgtttgagtggttataatgtgttagttttttttttaggtattggagataaagtgggataagagaggtgaggtttggatttttggtatttttacgataaaatatataggtaaatatttgtttttagggttttttgtgattatttttatttttgtagataagaggataaggtttttttagtttgtttatagtagttgaaaagtaaagtttttttgttagtagaggtaaaagattaagaatgtagagttcgatggggtattattatatgattatgaattaatgtaattttttattttttatttttaatttaggtattgtttttgaatttagttatttttttttttttgtttattagttgtttgtgatatattagtatttttatttatttttaattttagaggttgaaattaatttttttttttttttttttaattgttgaggaagatgagttaatggtgttattggattttgtgaattgatgttgtgaagagaggttatttaatacggattacggggaatggtgttatagggggtttagtgttgttttttatttttagtattttgtttatttagtattggtaagttatattagtttcggtgaaggaagtttggagagttaagtttgtgttttatttttatgttagtattatggtatttattgtatatttagtaagttttaaggaagttggtaggaggttggttgatatttacgggataggttaatttgttttttggagggtattttatgagacgtaaatatttttatattttgtgtttattttaagagatttttttatatgttttttttattttgatttttgtgttattagttttttaattttgttttttttaaatttttaaggtagtagttggttaatatattagttattattgatgagttagtgtagattttatattgggttatttttttttttttgtaaaatagaaaagtagatgttttgtttaaagttttgtttgttagtaagatttttttttttgttgtgttttaggatatttttgggagggattttgatgtagtagttatttatttattgttagtgttagtttattttgtataatattgattttttttttttatttgttgtttagttgtaggaaattttttgtgaagttataggtgtgtattgagggagagatattgagttaatgggagtaggtattatagagtttaagttttttgttagtttgagttttttgtgttttgtggatttggtgggtttattttttttattatatagatataattttcgtttaataatagtatgtttttgtaaatgtttaattttattatgtggtagattaggtaatatttagtttattagggtagttaggttgtgtagttatttgatgttatggattgaattgtgtttttttaaaagatatattagaattttaatttttaggattttagagtgtgatattatttgaatatagggtttttatagagttaattaatttttttgaattttatatagtttttattttagtgattaaaagaatgtagtaaatggaatttatattaattaatattaggtatgtatttttatttgaaattgttgttagtttatgattggtttaaatttttataatttatttaggtatattattgaattttttgtattttgatatatagggtaagttaattttttttttgtggtagtttagtaataagaattatgtttattggttagatttttttaaaattaaagatttttagatttttaggttgtttattttattttgagattatatttaatatggatatttaagtaaattattatataggaaagggagattattaagaaaattgaagtgtattgtataaatatttttatagatatttttttttagtattgataattaaatattagataaggatattaaattattttttttttatttttgttttttttgaaaaatataaggattttttttgaaatcgaaatgattttatataaatgagagatttttatgtatgtggttttattattaaaataataggaagtagttaatggggttttgagaaaagtatagtttcgtgtatagtaatatgtatttaaatagagttttttatttatttgttaattatttttataagattagtattaaaaaatataagtaaatatatgatttttaagttttatatataaaaaattggtttttgtttatttttagatgataggatgttttaaaagtaataaaagatgggagttagtttttttatagttgtttttttaattattttattaatagttttttatttattgaattattttttttttttaaagaggtaatgttgagattagttagaaaggttttttgagaaaattggtttggatttttgggtttgttgtagttaatttaagatgaattggtttgtattaatgaagcgtttaatgtagtttataaaataggttttagttcgattgtttaattttggtttaggtttgtttatgtattttttttaataaagtttagttatttggtgtattagttgttggaagcgttgtttttgagtttttattttaatgaaaatgttgtaattgcgggtttattgtatttaaattcgtcgtagaggaagagtaggaggaatttattttaggataattatgtttgtagagacgaatttcgtattaatttttacgtgtttttacgatttagttaattaatttaaaatgaggttattagggtgggttttaatttaatatgattgataattttataaaaaggagagatttggatatagaaagagatagagtgaaaattatgtgaagaaatataggaaaagatggtagttataagttaaggagaagtttgtagtgtgtatttatttgtttttatgttgttaataaagatatatttgagattgggtaatttataaaggaaagaaatttaattgatttatatttttatatgttggggatgttttataattacgtttgaaggcgaatgaggagtaaagttatgttttatatggtggtaggtaagagagtttgtgtaggggaatttttttttataaaattattagattttgtgagatttatttattattataagtatagtataggaaagatttatttttatgatttaattattttttattaggttttttttataatatatgggaattatgggagttataatttaagatgagatttgggtggggatatagttaaattatattattttatttttggttttttttaaattttatgtttttatattttaaaattaattatgttatgttaatagttttttaagttttaatttattttagtattgatttaaaagtttatagtttaaagttttatttgagataaagtaagttttttttgtttacgattttgtaaaattattagtaagttagttattttttagatataatggggttataggtgttgggtaaatataattattttaaatgggagaaattggttaaaatgaaggggttataggtgttatgtaaatttgaaatttagtaggttagttaaattttaaagttttaaaattattttttttgattttatgttttatatttaagttatgttaatgtaagaggtgggttgttatggttttgggtagttttgtttttgtagttttgtagggtttaggtttttttttggttgtttttataggttggcgttgagtatatgtggtttttttagttatacggaataagttgtttttggatttattattttgggggttggaggatggtggttttttttttatagttttattaggtagtgttttagtggagattttgtgtgggggtttatattttatattttttttttgtattgttttagtagaggttttttatgatggttttgtttttatagtatatttttgtttgggtatttgggagtttttatttattttttgaaatttaggtataggtttttaaattttaatttttgatttttgtgtatttatatgtttaatattatatgtaagttgttaaggtatggggtttgtttttttgaagtaatggtttgagttt

SEQ ID NO: 57 - DNA, 16891 bp, Artificial Sequence
  chemically treated genomic DNA (Homo sapiens)
  unsure (8209)
ttaaatttttgattttatgtgatttatttattttggttttttaaagtgttgggattataggcgtgagttattatattcggttttttattttttattttttagagataaggttttgttttgttatttaggttggaatatagtgacgtgattatagtttattgtagttttgaatttttgggtttaagtaatttttttgttttagttttttgagtagtcgggattgtaggtttttattattaagtttggtttaaatttgtatttataagaagtttttagaagaaataagattatattttgagtagtaatagtttagggtatgatattttatggtcgagattcgttggtgggtaataaaattaatagatgagtttgtgacgagtagtgaaagaaaatgtaataggttgggggttattggagggtattatagtcgtaaatttatttataggattataaaatgcgtttttattatttgagtttgagttttagggtttgtgttgggacgtgatattagggtcgtaaaggtttgcgaaaatttggtttgggagtgagggtaaataaagaaggaaggggttagtaattaagtttgggggaataaggaggaattagggaggagatagataaggtgattagggaggtgggaggaaagttaggatagaatgttttggaagttaagggaaaaaggtttggattttaattattttttgtttttttttagttttgtggttttgtaaatttgagttttagttttttttatcgtaaaatgttgatatgatagttttagttattgaagtggttgtaaagtggtatttggtatagggttaggtaattttatggatggtggtgtaattttaatttttgttttgttttttgaatttttttagattagtaggttgttttttttttgtgtagatgaagaaattgaggtttagaaagtggaaagatttggttgggtgcggtggtttacgtttgtaattttagtattttgggagggtaaggcgggtggattatttgaggttaggagtttaagattagtttgggtaatatggtgaaatttcgtttttattaaaagtataaaaattagtcgggtgtgatggtgtatgtttttagttattcgggaggttgaggtaggagaattgtttgaatttaggaagcggaagttgtagtgagttaagattatgttattgtattttagtttgggtgatagagtgagattttgttttaaataaataaagattttgtttgatgttatttggttagtgtagggtagagtttgggtattttgtttcgttttgtgggtttggttttgttgttattaatggtttttggttttaggttagtgttggagatagttagtcgtttggtgggtttttgggggtcgtttgaaatttttttagtggttagtggttagggtggacgtgttttgtttttttttgtagttttggtttttttggttagttaggaggaagaaagagtagaaagtgtgtatttgttttttgtggggtttaggtataggggtttggttattagttacgcgtttttcgggcgtgtggatagacggtatttgaatatattcgtattagttaaagtttcggtaggaaatagatggtacgttttagtaggattattagaggagagtttggtgaagggtttgtttatataggtgtggtcggggtgtagggaagttttaagggacggtgtagaattttagggttggtagcggcgtgggttgtgattatttttagtttgaagaggttaggggaggagttgagtttatagttggatagagttgggtggagggggtttttaataggatcgtggtttttagtggagggaggttattagtatgtagtgattttgtagggaaggggttggaagacggatttttttttttttgttttttttgatttttgtaggggtggggaagtggatgtgttttataagagggagagtgtagttgggggatgtagaagatagttattttaaggtttgtgtttagtagggaggttatgtggttattaggttttttcgggtaggagatttagtttaggattggtttttttttttgggaattaatgataaggtttatttttttgggtttttatgatttttatttttgttttgatttttagggttttttatgtttttagtaaatttattttaagagttgaaaggttttgggttttgtgttggggatatagtagtgtaaagggtgttaaagtttttgtttttatggggtttttaattaagtagagagatatatgtagatggttgtatataggtttaggtgtgatagggaaggttaggatgttgtgggagttagaggtgattttcgttttattttttattcgcggtggttttaatttttttttttttttatgaggtgtttggggtcggggttttagttttttttggagtttatttggagttttttttattttttagagaatttattgggttttgtttataacgtggatggggatagattgtgtagcgtggagggaaggggagggagggagttttgggaagagttttttgtggggtttttgttattgttttagatgtttttaatattttgtgatatttgtagtttttgttatatttgttttttattttaaatttagtttaggggatggtggtagggaaggaggtgagtttggatttaggtagttttggggttattattttttagttggggttttttttttgtaaagtggaggtataacggtatttattttttggggtggttgtgaggatttagagttgataaggtgaacgtttagggcgggttttggtgtagagagagcgtttagtttttagggttggattaattgtttttggggtatagatttcggtttggggtttgtggaaattttagagttatttttgaatttttatcgagttattttttgtttcgtagtgtttatggttttgttttcgaggttataggaaaaggtagaggagatgttttttttagggtggttttttgggagaggatatttttttttgattttaaagttacgtttggttgtaaattggttaggtagttataaggttgggtaagtaaaattatttttaatttttatttaaagagttatatcgatttttttagtcgttgtgatagtttttgtagagataaatatacggtttatttttgttattcgggtcggttaataagtacggagaggtaaggttttagattttggatagatattttttttttagaggtatttagggttttagtttttttttttttttttgggttttaatttttttatttgtgatttagggtaggtggatttagggagaagaattttttggttttattttatcgtgggttttgttagtatatataaagatttggttttttaaagtttagttttgttagcgtttttttgtttaagaattttttatgatttttagtggttttaaggataaagttttggtatttgaggtttttttaatgtagggttagattttgtttttttagttttttgtttttattatatttttgttggttttacggtggttcgattgttttttgtttttgtgtttttgtttagtttggtatttttgtttggtatgttttttttatttttttttttttttaattttaatttatttagttttttaaagggtaggtttaaatattaggttttttaggtggtttaggattttttttttgagtttttatgggtttggttttgggtgttatttgtgagtagttttacggtgggtatatagtaggtgcgtttattgtttgtagaatgaatatgggatagtttggggattgttatttagtttagggagtattgatggggaagtattttttgtatgttttagggtttagtgttgtagtgttttgatttttagaaattttataatggtttggttaggaaggtatcgtgttttattttgtaaatagggggtgttgagaattgaggggttttgtttaaggttttatggttaggagtaagtagaatcggatttgaatttagggttacgtgattttagaagtgttattaaagtttttataatttggagttgttttttttttttttttttttttttttttttgagatcgagttttattttgttatttaggttaggagtgtagtggtttgattttagtttattgtaattttcgttttttaggtttaagtgattttttagttttagttttttaagtagttgggattataggcgtacgttattatgtttagttaatttttgtatttttagtagagatgggtttttattatgttggttaggttggtttcgaatttttgattttaagtgattcgtttgtttcggttttttaaagtgttgggattataggtttgagttattatattcggtttggagttgtgttttgtcggtgaaggattttttatttatgaaggggttagacgtgaagtgtgtggttttgggtagtttttttgagtttagagacgttagttttagtcgttttgttgtgttattttgggatttttttttttagtttgagttttagtttttttgtttgttaggtagttttatgttaattgtatttagtaggtcgggtttgatgttcgataagacgtgaagtggtggaggtgggtaggattttagcgttattatttttttgaattagtgattttaatatatcggatttttgtttttttatttgtaaaatgggattagtgagtttaggtgggttataaattttataggaattattttagttaagatcggttttttgaaagtttttttcggtgggttgttagggtgattgtttttatttgtggggttttttgatgcgttttatttattagttttggagagggtgggatgggagggtggggtgtttggggagataagtttagagtttggggttttttattttattgtttttttttattatagggttttttatttagtgataaagttcgtggtattttttttattcggttggtaggcggtttggtttagttttttttttaaggaagcgtattttttgtttttttgggtcggtcgggttggatgagttaggagttttttgttgtcggttatattatagtttttatttgcgttttggggttaggattgttgttgttattgttatttattggagtttagtatttttttttcgtttatttttcggatagtaattttagtttagtttcgcgtttttgtgtttattttttttgatttttcggtcgttattttagaaggttggagtagggacgtcgtcgtttcggtcgtttgtttttttcgggttttcgtgcgagtttacgtcggtttcggtgttcgttcgtagttttgttattggatataggataaggtttagcgtataggtttttacgtggatagtatggatcgcggtacgttttttttggttgttgttttgttgttggttagttgtagttttagttttataagtaggtgtttagggatttagggtggggagattcggttttcggtgtacggattaggttttaagtattttcggttttttttttgtattttgagtttacgtttagtagagttatttttggggttttggagggttattaatttttttagtttgttggaattaaatggttatgtaggatttttagtgttgaaagaaagtttcgggtaaattgggttgatttttttattttaattttggtttttggcgtttgtttatttagttgcgttttattatttttcgggaagtttaggttttagaatgttgtgtagcgacgggagagttttttggtttttttgggttttgagtttttttatgaggaatggatgggaaggagggtttatagtttgggttttgagtatcgtttttgggtttaaattttatataggtatttttttgtggtgtgattttgggggattgttttcgggtttttgagcgaagtggggaagagaatagattttttttttagagttgttgaggaggtgggtggtgagggattattgtagagagggttttggtagattggttatttttgtgttgttttatttttagttttaagtttttttagtttattttttttagggtttttgggtagttttttaaattttttgaataggttaaggttgtagggttttgttttgttttttttttatttttttgatttttagaaagggtgtaggagtgggtgtaggttaggttaggggttttgtggggttttttggtttgggggtttttttaaggggttatggtttttgttgttttttgaaattgattagaggaggggcggtgaggagtaagggatttttagttttatgttttattttttatttttcggttattttaagtcgttggtcggttttgtggatattttttgatttatttgtgtatttaggggttttttgatagatttgggggaagaggggtagaaatgagttgagagtgtggggaggaaggggaaggaaaatagcggtggggtagttaatttttttttatttttttatttgatggtattttagagtttttgattttgggtttttaaagttttgtttattatttgattgataggaaattgagttttagatatattaagtgatttagtagggatttgattttcggtttgcggttttttaaatgtttgtttttagtaaggtgtgatagggcgaatttttttaatgcggtttataacgattttgtaagatggttgttattattatttttattttatagaagagaaaagggaggttttaatttgttaagtttatatggttaagacggagtttttatttgagttttaagatttttttttttcgtatttgtcgttgtagtaatatttttttttttttggtcgttagagaaaggtttatgtagatatttagggtttggttttaaaggattaaaggtagtgatatgttgttgaataattaataacggggtggggagtttaatttgtagcgtttgtggatttttatagcgtaagtatttttattcggttgattttaagttattaatttattaagtttggagttgggaattagtgttcggtagtatttggcggttggttttttagagtttttgtaggcgtagattatatcgagagtagagatgatagttaggggtgtaaaacgattagaaagaaatgagtttggatatttatgattttttaaaaatatatagtaatagttatgtaatagttagttggaaaaatttttggaaacgtattcgtttgtttttgtgagtaggtaggagttggttttagtgtattaggagttataggtttaaaggtataatagattattaatttaatttatttatggtttgggaagttgaggtttatggaaggtagaggggagtttggggttagggtttggaagttagttgggggtaggggtcggagtgattttgattttttagaaatgggtttagaatttgggggtattatttgtaagaattttttaaaattgtattttgtatgtgatttgatatttttataaattagtttttagtagttagttttttaaagttattcgtttaattttgtaaagatgcgtggttcgtgggtatttgtaataaaaattcgataattggaaattatttaagtgtttatgagtaaagattgttaataaattattatacgacggaatgttatgtagtaggtattaagaaggtagagttatatgaatattgttatggacggatgttagggatatattgttaggtgtttaaataataataattttattttggtaataataaaatagtaataatgtataatatgtatagagaaaattttggaatagagttttttatttaatttattattattgttttttggtttggggttttttttgtgggatttttatttttttttttaaatttttttgagatagttttgtttttgttatttaggttgtagtgtaatggtataatttaggttcgttgtaattttcgtttttcgggtttaagtagtttttttgttttattttttcgagtagttgggattataggcgtcggttttatattcgtttaatttttgtatttttagtagagacggggttttattatgttggttaggttggtttcgaatttttgatttcgtgatacgtttgttttagttttttaaagtgttgggattataggtgtgagttattatgtttggttgggattttgatttttttagatatatttttttgttatgttgggttttttcggtttattttggttaaagataatcgttttaaaaaataaataaaaataaaatanataaagtatgtttaaagattaggaatatttcgttaaataattataatttagagttttaatagtattaaatttagatttttgttatttttatacgtattttgataatagttaatagttagtgtgtaatttttcgtagtgtttgtataatgtgtttaatagtttatttgttgaaatttgtatgtaatttaggattgtatatcgtatttggatgtgatgtttattagattttatttatttatttatttatatttttgatgcgatagtttcgttttgttatttaggttggagtgcggtggtgtaattttagtttattgtaatttttatttagtaggtttaagtgatttatgtgttttagtattttaagtagttgggattatagacgcgcgttattaggtttaattttcgtatttttagtatagacggggttttattatgttgtataggttgttttagaatttttggcgttaggtgatttgtttgcgttggtttttagaagtgttgggattataggtatgagttattgattaaaaatataaaaattagttaggcgtagtggtgggcgtttgtaattttagttatttgggaggttgaggtaggagaatcgtttgattttgggaggtggaggttgtgatgagtcgagattaagttatcgtattttagtttaggtgatagagtaatattttgtattaaaaaagaaaaaaaaagaataagtatgtagagatttttttaaagtaattaaaattaattatatagttgttttagtttgttttttaaaaaaaatagagaaaagggaaaaaattatttcggaatttttttattgatataggtatcgttagtatggtggtagatggtttattagtttttttttttaattttttaagttatttttaatttagatgggtttatattttgggagttttttgtttatttttttcgaattaggtttttatgttgttttgtggattttatgattatttttttgtatttttggaatattttgttttattaatttgttatcgtttgtttattgttaaatatttaggtggttttttttttgttttagttataaatattattataatgtatagttttggtacgtgtatttttttttgtattttggattattttatgtggattgcgtttcggtagtaaggttgtagcggttcgtggtttgtgttgggtggttgggattgaagagtgtttttgagtgtggaggattttttgttggaggatttaaagtttttatgttgttggttgtttgtgttggagtttgggatttgttggagaagggttagtggcgtaagagcgagattataaatatttgttttttagaggttgcgtttttatttgttaggaggaaaaagagtttggagtaggagtcgtgtgaattaggagagggtgggtttttcgagatacgggggacgtgattattagtatttttttttattttagttagatagacgtgatttagagggatagagggatttgtttgtggttacggatgtgttggtgttgggttttcgggcgatagatttatttttttgttttagggttggaggtggatttgggtaagagtgaggcggttattttttttttgtttttagtatgttaggtataatgttagtttttttttgtttttatttttagtttatagatgagaaaattgaggtttgggataaatgataggtttagattttaattttaggtcgtttgtttttaaatttagttttttttttttataatttttgtgatttgaatgttggagatttaaagaattgtttatttttggttttgggattttgttttttagttttagtttaggttttggggtattagttttggaggttgaagggatttttagttagggtttagttggttttaatttttgtggtaggagtgggggtgggataaagagataatataataattgatatttatttagtatttatagtatgttagacgttgttttaagcgtggtatgtgtattgttagatttaacgtttgtaaaagttttataaaggagatattttttttgtttttatttgatagatggggagattgaggtattcgtataatttagttaggtgaagaaatttatttaagtaatattgttttgaaatgagttattggggtttaagttttgggtttaagtattgtagtgtgttgttatagtggagaggatggggattttttttttgtttgatttttttttcgtaggtatttagttttttttttggtttttataacggtttttttattcggggtataatttttgggattttgtttttatttttagtagttttatttatgttttgttttgttttttttttgtttttatttttaggtgaaattttagattgttagatttttagtagaatttagaatatgttttatttattttcgtttttttttatttattagttatagggaaatagagttttagaatggtggggggatttgatgtgggttatttagtaggttagaggtagttttgattagttagttttataaatggatgtttgtggtgttagaaataaaatgtttgttttttagtgtcgtaaagaaatagtatttgaatataaatttaatttttttagtaaggtaatttttatttttatagaagggtgcgatttaagaatggagtaatggcgagagtatatttgaataagggaggggaaggggtttttatttttgacgtaggtagtttttattgttacgtcgtttttttacgggttagtgttggatcgtatagtttaagttaattttagttagttattttagagagagtaggggtatgagttagagtggcggggtgagtagtttggcgggaaggatggttaggaataggtaattaaaggtgatttaggttaaagtaggtgattaggggtttgtgaggttaaagtatatgattaggatgagttaggatggagtaggtgattaggggaatagatgtgaattattgattaaaattggtggaaaaggttgtttattgaaattatgaggaagttaaattttaaaatggaggataaagaattgaatatattgatatattgattttttgaagagaaatttagaatttattgtatttagtggaagtggatgtttgttttgagttttggattaattgattgggatatggaatgttgtggattttttttgttttggaaaaatttattgtttgttgggagtgtagatatattgataaattaaaatagtatatttgggtatgtatggtttggttttttaaggatatttaaggacggatgtatttaagaaaggagggattggttttagtgagatttttaggatagggttttgaaggatgaatagaagtttgttaggggttgggtatggtggtttatgtttgtaattttaacgttttgggaggttaaggtgggaggattatttgcggttaggtatttaagattagtttgggtaatatagtaagattttttttttataaatatttttaaaatttagttgggtataatgatttatatttgtagttgttcgggaggttgaggtagaggattgtttgaggttaggaggtggaggttgtagtgagttatgattgtattattgtattttagtttgggaaatagagtaagatttcgattttttaaaattaaaaaaaaaaggttaggtggttaaataaaggatgagtgttggtttgggaaagggtatggtagaggtaggagcgaggtgtgtttaggggaagagtttatatatttttattgattgggtataaataattgtgatagtagttattagtttttgagtaatttttatttagtaggagtcggtttagcgttgtgtaggtgtaatttattggtttgtttgtcgattttatgggaagttgttatgatgatttttatttttatgttatagatgagaatattgaggatggaaaggtagttggtaggtggaagaattaggatttgaatttttggtatttgttaaatcgttgtgttttttatttttattgtaggttgtagtgtaggaatttgattttgtaggtatcgtagaattaggggggagttcggggttaaggtatgttgagattttttggtggttgggggtagtggttgggttggatgttgggaaatttgtgaggttgtaattgggtttgaaaagggtaaagagtggttcgggggtattgaataagacggggtaggtattgtagtaagaaggatttttgttgaaacgtattttttttgggaggttgagatgggtggattgtttgagtttaggagtttgagattagtttgcgtaatacggcgaaatttcgtttttataaaaaatataaaaattagttgagtgtggtggtttatttgtagttatttaggaggttgaggtatgagaatcgtttgaatttgggacggggaggttatagtgagtcgagatcgagatattgtattttggtttgggtgatagagtgagattttattttagaaaagaaaagggggggtggtagcgggaagaaaagtatttgttttagtatgatgaaataatatttatagtttttgtgtttggggtatttatttagtattaggtatttaataggggttattttattaaattgatatatttagtttgtgaatgtttgttgtttgttggagttagattgtttgggtttaaatttaggtcgtgatatttagtagttgggttatttcgggtagttggtttttagtttttttaatcgttttggtttttagttttttggagtgtgtatgggtgtaatagcgtcgtttattttataaggttgttgtgaggattaaatgagtttattcgtgtaaagttgtttaggtttttagtaagtatgatgggagtatttgtagtgattattggtggtttgtaaatggggaaattgaggtttagagaggttaggtttttgtttaaggtgattagtattttaagaggtagagttgggatttgatttaggttatttggttttagagttgttttttttgattattttttaaggtgttgaaggtagttttttggaaatttgggaggtgttgtgtgtatatgggtggcgagggtggagaggggatagtggtgggaggtggtttttgggttttttatttggggttttagttatttaggtttttagcggttttttttttgatttagtttcgggaggttttggcgttttttttggtgttaggggattgtttttaatttggtttgggttcgttttaggtttcgggagataggtttaggcgttatatttttttttgtttttttattttcgtttgcggggtgggggcggttaggattcgaaaaggttttaaaataaatggattttttatttgattttttcgttaggtttgttatttgattattatataatggttaggtttgtggtttttttcgttggttgacggtatggaggaggcggttttaggcggttttagtaattcgggaggaattggggtttttggaagtttggggagggggtagggaaagttttaaagggaaggagggaggcgttgcgataatttgtaggttagatattgggttatgttgggagacgcgggttcgaggttcggtttggttaattatgtgttgtgagattttgatttgtttcgtttttttagattttagtttttttatttgagtaggaggggtttaagttaggtaatagttaaggaatttgcgtttatcgatgaggaaaggagagggtggggagaatatgggggttggtgggttagagggattggagataggagatggtattagtttttgattttgttggggtgagggagattttagtgatttttttattttagaggatcgttatttggaggttattttatttcgttattttattttattttttagaatagttaattttatagtgattgaagttagttaaataattgtaattaagagaaagttgtcggttaggtatgttggtttatttatggtggtttatatttgtaattttagtattttgggaggttgaggcgggaggattgtttgagtttaggagtttgagattagtttgagtaatatagtgagatttagtttttattgaaaatttaaaaaattagttaggcgtggtggcgtataattgtagttttaattatttgggaggttgaggtaggaggatcgtttgaatttagtagtttaaggttgtagtgagttgttattatattattgtattttagtttaggagatagagggtaattttgtttgaaaaataaataaatagaaatttaagaaagaattgttatgtgtttagttttatggagtttttttagttatttttgtggattatgtgggttttgttgttattttatagattaggtattgaagttttaagaggtgaaattatttattagagttatatagttggtaagtattgggtttgagaggtaaattaggttagtttggttttagggagtttgtttttaattaaaatgttattatgtttaggtattttagagtttttgggatatgtaggatagggttagagagacgatatataaggtttgggttttcgtggtagttagaagtttttatttagatttttttttttttaagatagagttgggaatggcgttgttatggtaaggggtgattattttattttttttgttgatttttggggtttagagtttaacgtgttgtgggaaggtgaggaaggaggtcggtgaggttttagatagtttagggtttagaagaagtttttttgtttttttttttgagtcggttttggttggatatgaagttagttttttcgcgtttatttttgatttttaagaaaataggaagtgagcgcgataagatggagatataaatttttaaatagtttttttttttgttttttttttttttttcggagtttttttttttcggtatattttttaggacgaggtgtaggagttttattttttttttcgattttgttgggttagggtgaaattttattttttttttttaggatttgtgttttcgggttttgcggtttgttttggtagtttttaaatttgggtcgttttttcggttcgttttgttttttggggttagggaatttttaatttttttagattattttttttattattttgaggtaagagaggggaagttttgttttttgagtttagtttttgttttatttggagggagatttgggtttatatttaggttttgttatgaagttagggttgttagatatattaaatgaaaattagtcgggtgtggtggtttatgtttgtaattttaatattttgggaggtcgaggtgggaggattttttgagtttaggagtttaatattagtttgagtaatatggtgaaattttatttttataaaaatgtaaaaattagttggatgtggtggtgtatgtttatagttttagttatttaggaggtcgaggtgggaggattatttgagtttgggaggttgaggttgaggttgtagtgagttatgattttgttattgtattttagtttgagtaatagagtagagtttgttttaaaaaaataaaaaataggttaggcgtagtggtttatgtttgtaattttagtattttgggaggttaaggtaggcggattatttgaggttgggagtttaagacgagtttgattaatatggagaagttttatttttattaaaaatataaaaaattagttaggtatggtggtgtatgtttgtaattttagttgttcgggaggttgaggtaggagaattatttgaatttaggaggtagaggttgtagtaagtcgagattatattgttgtattttagtttgggtaataagagtaaaatttcgttttaaaaaaataaaataaaataaataataaaaaataatttttaaaaataaataaaaaataaaaatataggaggttggtcgggtacggtggtttacgtttgtaattttagtattttgggaggtcgaagtgggtagattatttgaggttaggagttcgagattaatttgagtaatatggagaaattttatcgttattaaaaatataaaattagttgggtgtggtggtgtatgtttataattttagttatttgggaggttgaggtaggagaattatttgaatttaggaggcggaggttgcggtgagttaagattatattattgtattttagtttgggtaagaagagtaaaattttattttaaaaaaaaaaaaaaaaaaaaaaaaaaaaaaaaatatatatatatatatatatgtatgtggatgtgtgggtgtatatatgtatatttatatatgtatatatgtatgtatatatgtagatttatgtatatgtgtgtgtatgtatatatatatatatatatatatatatggggtttagtgaaattcgaattttagataaataatgaaaaatttagtataagtacgttttatgtaatatttgtaatatattaatatttaaaaaaatgtatttattgtttatttgaaatttaaatttagttgggtgtttttttatttatcgattttatacgtagtagcgttgtgattttgggtaggagacgtttttttttttagttttggttttttttaatttatggaacgaatataatgatatttattttataaggtggttgtgatgatgtaggaaagtcgttagtttatgttaagtttttaggagacgtttggaaagtaggagttattgttattattttatttttatttggttttttttcggatgtttttttaatagg

SEQ ID NO: 58 - DNA, 16891 bp, Artificial Sequence
  chemically treated genomic DNA (Homo sapiens)
  unsure (8683)
tttgttggagaaatattcggaaagaggttaggtgagaataaggtgatgataatgatttttattttttaaacgttttttagggatttgatatgagttaacggtttttttgtattattatagttattttatgaggtggatattattatattcgttttatggattaaaaaaaattaaggttaggagaggaaacgttttttgtttaaggttatagcgttattacgtatagggtcgatgaatagaaggatatttagttaaatttaaattttagataaataatgagtgtatttttttaagtattagtatattgtaaatattgtatggaacgtatttatattaaattttttattgtttatttgaaattcggattttattgggttttatgtatatatgtgtgtgtgtatatatatatatatatatatatatatagatttatatatatatatatatatatatatatatagatatatatatatatatttatatatttatatatatatatatatatatatatatttttttttttttttttttttttttttttttttgagatggagttttgttttttttgtttaggttggagtgtaatggtgtgattttggtttatcgtaattttcgttttttgggtttaaatgatttttttgttttagttttttaagtagttgggattataggtatgtattattatatttagttaattttgtatttttagtagcgatggggtttttttatgttgtttaggttggtttcgaatttttggttttaggtgatttgtttatttcggttttttaaagtgttgggattataggcgtgagttatcgtgttcggttagttttttatatttttattttttatttatttttaaaaattattttttattatttattttattttatttttttgagacggagttttgtttttgttgtttaggttggagtgtaatagtgtgatttcgatttattgtaatttttgttttttgggtttaagtgatttttttgttttagtttttcgagtagttaggattataggtatgtattattatgtttggttaattttttgtatttttagtaaagatggggtttttttatgttggttaggttcgttttgaatttttaattttaggtgattcgtttgttttggttttttaaagtgttaggattataggtatgagttattgcgtttggtttattttttatttttttgagatagattttgttttgttgtttaggttggagtgtagtggtaaaattatagtttattgtagttttagttttaattttttaggtttaagtgatttttttatttcggttttttgagtagttggaattataggtatgtattattatatttagttaatttttgtatttttatagagatgaggttttattatgttgtttaagttggtattgaatttttggatttaagagatttttttatttcggttttttaaagtgttgggattataggtatgagttattatattcggttgatttttatttgatgtatttggtaattttaattttatggtagggtttaggtgtgaatttaagtttttttttaggtaaggtaggagttgagtttaggagataaagtttttttttttttgttttaaggtggtgggaggaatggtttgaaggggttgagagttttttagttttaagggatagggcgagtcgagaaggcggtttaggtttggaggttgttagagtagatcgtagagttcggaaatataggttttgagggaaaggaatggaattttattttgatttagtagggtcggaaaaggaaatgaggtttttatatttcgttttgaggaatgtgtcgggggaagggggtttcggaggagggaaggaggatagaaggggagattgtttggaagtttgtgtttttattttgtcgcgtttattttttgtttttttggagattaaagatgggcgcggagagattggttttatgtttagttaaggtcggtttagaggagggggtagggaggttttttttgaattttgggttgtttggagttttatcggtttttttttttatttttttatagtacgttgggttttgggttttagaagttagtaaaggaagtgagatggttattttttgttatggtaacgttatttttagttttgttttgggaaggagaagatttggatgaggatttttggttgttacgggggtttaggttttatatgtcgtttttttgattttattttatatgttttagggattttggagtgtttggatatagtggtattttggttaaaagtaagttttttggagttaggttgatttggtttgttttttaggtttaatgtttattagttatgtggttttggtgaatgattttattttttggggttttaatatttggtttataaaatgataatagagtttatatgatttatagaggtggttgggaggattttatgagattgggtatatggtaatttttttttaaatttttatttgtttattttttagataaggttgttttttgttttttgggttggagtgtagtggtgtgataatagtttattgtagttttgagttgttgggtttaagcgatttttttgttttagttttttaagtagttgggattatagttgtgcgttattacgtttggttaattttttaaatttttagtagagattgggttttattatgttgtttaggttggttttaaatttttgagtttaagtagttttttcgttttagttttttaaagtgttaggattataggtgtgagttattatgagtgagttagtatgtttggtcggtagtttttttttaattataattatttgattgattttagttattgtagaattgattgttttaaggggtggggtgaagtggcgggatggggtggtttttaggtgacggttttttgggatggagaggttattgggattttttttattttaataaaattaagggttggtgttattttttgtttttagtttttttgatttattagtttttatgttttttttatttttttttttttttatcggtgagcgtaggttttttggttgttatttagtttaagttttttttatttagatggggagattgaggtttggagggacgggataggttaaagttttatagtatatggttgattaggtcgggtttcggattcgcgttttttaatatgatttagtgtttggtttgtagattatcgtagcgtttttttttttttttttgggattttttttgttttttttttagatttttaggaattttagtttttttcggattgttggggtcgtttggggtcgttttttttatgtcgttagttagcgggagaggttataagtttggttattatgtaatgattagataataggtttggcggggagattagataagaggtttatttattttggggttttttcgaattttggtcgtttttatttcgtagacgagaatggggagataggagggagtgtgacgtttgggtttgtttttcggagtttgaggcgggtttagattaagttgaaaataattttttggtattaagggaaacgttagggtttttcgggattgggttagaggaggagtcgttgggggtttgggtgattggaattttaagtgagagatttagaagttattttttattattgttttttttttattttcgttatttatgtgtatatagtattttttagatttttagagggttatttttagtattttggaggatgattaagaaaaatagttttggagttagatggtttggattaaattttagttttgttttttaaaatgttggttattttgagtagaagtttaatttttttgagttttagtttttttatttgtagattattaataattattgtagatgtttttattatgtttattgggagtttaggtagttttatacgagtgaatttatttgatttttatagtagttttgtgaggtgggcggcgttattatatttatgtatattttaggaaattgaagattagggcggttaaagaaattgaagattagttgttcgaggtgatttagttattaagtgttacggtttggatttaaatttagatagtttggttttagtaagtagtaggtatttataggttgagtgtgttagtttgatggggtaatttttgttgagtgtttggtattaagtaggtgttttagatatagaagttgtgaatattattttattatattaggatagatattttttttttcgttgttattttttttttttttttttgagatagagttttattttgttatttaggttagagtatagtgtttcgatttcggtttattataattttttcgttttaggtttaagcgatttttatgttttagttttttgagtaattataagtggattattatatttagttaatttttgtattttttgtagagacggggtttcgtcgtattgcgtaggttggttttaaatttttgggtttaagtaatttatttattttagttttttaaggaagatacgttttaataagggttttttttgttgtaatgtttgtttcgttttgtttagtattttcgggttattttttattttttttaggtttaattatagttttataggttttttagtatttagtttagttattgtttttagttattaggaggttttagtatgttttggtttcgggtttttttttggttttacgatgtttgtagggttaagtttttgtattgtagtttatagtagaggtgaaaagtatagcgatttgatagatgttaaaggtttaggttttgatttttttatttgttagttgtttttttatttttagtgtttttatttgtaatatggggatgagggttattataatagttttttatggagtcggtaagtaggttagtaaattatatttgtatagcgttaggtcggtttttgttaagtgggggttgtttaggaattggtgattattattataattatttatgtttagttagtggggatatgtgggttttttttttaaatatatttcgtttttgtttttgttatgtttttttttagattaatatttattttttgtttgattatttggttttttttttttaattttggagagtcggggttttgttttgttttttaggttggagtgtagtggtgtaattatagtttattgtaatttttattttttggttttaagtaattttttgttttagtttttcgagtagttataggtatgagttattatgtttaattaaattttaaaaatatttgtggagaaagagttttgttatgttgtttaggttggttttgaatgtttggtcgtaagtgatttttttattttagttttttaaaacgttgggattataggtatgagttattatgtttagtttttagtaaatttttatttattttttaaaattttgttttgaaaattttattgaagttagtttttttttttttaggtgtattcgtttttgggtgtttttggagaattagattatatatgtttaggtgtgttgttttgatttgttagtgtgtttgtatttttagtagatagtgagtttttttaggataaggagagtttatagtattttatgttttaattagttagtttagggtttagagtaaatatttatttttattggatatagtgagttttagatttttttttaaagaattagtatgttagtatgtttagttttttgttttttattttaaagtttaatttttttatggttttagtaaataattttttttattagttttaattagtagtttatatttgtttttttggttatttgttttattttgatttattttggttatgtgttttgattttataaatttttggttatttgttttgatttaagttatttttagttatttgtttttaattatttttttcgttaaattatttatttcgttattttggtttatatttttgttttttttaaaatagttaattggaattagtttagattgtgcggtttaatattagttcgtaggggaacgacgtagtagtaggggttatttgcgttaggagtaagaattttttttttttttttgtttagatgtgttttcgttattattttatttttgaatcgtatttttttgtagaagtaaaaattgttttgttgagaagattaaatttatgtttaagtgttatttttttgcggtattgaggaataagtattttgtttttaatattataaatatttatttgtggaattggttggttagggttgtttttgatttgttgggtgatttatattaagtttttttattattttgggattttgtttttttatggttagtgggtggggaagagcgggggtggataggatatattttaagttttattaggggtttgatagtttgagattttatttaaggatgaaggtaggaggaagatagagtagggtatagatggggttgttgaaggtaaaggtagggttttaggggttgtatttcggatgggagggtcgttatggggattagagaaaaggttgagtgtttgcggggagaagattaggtaagaggaagatttttattttttttattgtggtagtatattgtagtgtttaggtttagggtttgagttttagtggtttattttagggtagtgttatttgggtaaatttttttatttgattgagttatacgagtattttagtttttttatttgttaaatgggggtagaaagagtattttttttgtagggtttttgtaagcgttaagtttgatagtatatatattacgtttagagtagcgtttagtatattgtaagtgttgaataaatgttagttgttatattatttttttattttatttttatttttgttataggggttgaagttagttgaattttggttgagggtttttttagtttttaaggttggtgttttaaagtttgggttggaattaggaagtagggttttagagttaagggtaaatagttttttaggtttttagtatttaggttataaaagttgtggggaaaagaagttgaatttggaagtagacggtttggagttgaaatttggatttgttatttgttttaagttttaatttttttatttataaattggggatagaggtaaggaggagttggtattatgtttgatatgttggggatagaggagaggtggtcgttttatttttgtttagatttatttttagttttggggtaaaagaatgggtttgtcgttcgagggtttagtattaatatattcgtgattataagtaagtttttttgtttttttgggttacgtttgtttggttggggtgagggagaatgttaatggttacgtttttcgtgtttcggggagtttatttttttttggtttatacggtttttgttttaggttttttttttttttagtaaatgggaacgtagtttttaagagataggtgtttgtggtttcgtttttgcgttattgatttttttttagtaagttttagattttaatatagatagttagtagtatggggattttaagttttttagtaaaggattttttatatttaggaatattttttaattttagttatttagtataggttacgagtcgttgtagttttgttgtcgggacgtaatttatatgaaataatttaaaatataggaaaaggtgtacgtattaaaattgtgtattgtggtagtatttataattagaataaaggggaaattatttaaatatttaataataagtaaacggtgataagttgatgggatagaatattttagaagtgtaagaggatggttatggagtttataggataatatggagatttggttcgaaagaaatagataaaagatttttaaaatgtggatttatttggattaaaagtagtttaaaaagttagaaaaaaaaattagtaagttatttattattatattaacggtatttgtattaataaaggagtttcgaggtgatttttttttttttttttattttttttgaggggtaagttgaggtagttatatggttaattttaattgttttaaaaaaatttttatatgtttgtttttttttttttttttttgatataaagtgttgttttgttatttaggttggagtgcggtggtttgatttcggtttattataatttttattttttagggttaagcgatttttttgttttagttttttaagtagttgggattataggcgtttattattacgtttggttaatttttgtatttttagttaatgatttatgtttgtaattttagtatttttggaggttaacgtaggtagattatttgacgttaggagttttagagtagtttgtgtaatatgatgaaatttcgtttgtattgaaaatacgaaaattaggtttggtggcgcgcgtttgtagttttagttatttgggatgttgaggtatatgaattatttgagtttgttaggtggaagttgtagtgagttgaaattgtattatcgtattttagtttgggtgatagagcgagattgtcgtattagaaatataaataaataaataaataagatttgatgagtattatatttaaatgcgatgtgtagttttggattgtatgtaagttttaatagatgagttattagatatattgtgtagatattgcggaaaattgtatattggttattagttattattagagtgcgtgtgagagtggtaagagtttgaatttagtgttattgaaattttgaattgtggttatttagcgaaatgtttttaatttttgggtatattttatntattttatttttatttattttttgagacggttgtttttaattaaaataaatcgaaaaaatttaatatgataggaaagtgtgtttgagaaagttaaagttttagttaggtatggtggtttatatttgtaattttagtattttgggaggttgaggtaggcgtattacgaggttaagagttcgaggttagtttggttaatatggtgaaatttcgtttttattaaaaatataaaaattaggcgggtgtggggtcggcgtttgtagttttagttattcgagaggatgaggtaggagaattgtttgaattcgggagacggaggttgtagcgagtttagattgtgttattgtattgtagtttgggtgataagagtaagattgttttaaaaaaatttaaaaaagaaagtgaaagttttatagagaaaattttagattagagaatagtaatagtgggttaaatagaaaattttattttagaattttttttgtgtatattgtatattattattattttattgttgttaaaatggaattattgttgtttgggtatttaatagtgtgtttttgatattcgtttatggtagtgtttatatgattttgtttttttggtgtttgttgtatgatatttcgtcgtgtggtaatttattaatagtttttgtttatggatatttagatgatttttagttatcgggtttttgttataggtatttacggattacgtatttttatagagttggacgaataattttagaaggttgattattgaaggttgatttgtgagggtattaagttatatgtaaggtatagttttaggagatttttataagtggtgtttttaaattttagatttatttttaggaggttagggttatttcgatttttatttttagttggtttttaggttttggttttaggtttttttttgttttttatgggttttagttttttagattataaatgagttgggttgatggtttgttgtatttttgagtttgtgatttttggtgtattgggattagtttttatttgtttataggaatagacggatacgtttttaggagtttttttaattggttgttatatagttattattatatatttttaaaaggttatgaatgtttaaatttatttttttttaatcgttttatatttttgattgttatttttgttttcggtgtgatttgcgtttgtagagattttggagaattaatcgttaggtgttatcgggtattgatttttagttttaaatttggtgagttggtggtttgaagttagtcgggtgggagtatttacgttgtgaaaatttataaacgttataaattgagttttttatttcgttgttaattatttagtagtatattattgtttttgattttttaaaattaggttttaaatgtttgtatggatttttttttaacgattaagaggaagagagtgttattgtagcgataaatacgagagagggagattttggagtttaggtaggggtttcgttttagttatgtgaatttggtaggttagagtttttttttttttttttgtaaaatggggatgatgatggtagttattttgtagggtcgttgtgagtcgtattaagagggttcgttttattatattttattaggagtaaatatttagggagtcgtaggtcgggagttaaatttttgttaagttatttaatatgtttgagatttagttttttgttaattaggtggtgggtagagttttagagatttagaattagggattttaaaatgttattaggtggggaggtggggagaagttggttgttttatcgttgtttttttttttttttttttttatatttttagtttatttttgtttttttttttttaaatttgttaggaagtttttggatgtataggtgggttaaaggatgtttataggatcggttagcggtttgaggtggtcgagggatagggagtgggatatggggttgggggttttttgttttttatcgttttttttttggttagttttagaaagtagtagaggttatgattttttggaagagtttttaggttaaggagttttatagaatttttaatttggtttgtatttatttttgtattttttttggggattagggaggtaggagggaggtagggtagggttttgtagttttggtttgtttaaagggtttgaggagttgtttaaaggttttggggaaggtgagttggaggaatttaaagttaaaaataaaataatatagaagtggttagtttgttagagttttttttgtaatgattttttattatttatttttttagtagttttgagagggaagtttgtttttttttttatttcgtttagaggttcgaaggtagttttttaggattatattataaggaagtgtttatgtgagatttgaatttagagacggtgtttagagtttaggttgtgggtttttttttttatttattttttatggggaaatttaaggtttagagaggttaggaaattttttcgtcgttgtatagtattttgggatttaggtttttcggggagtaatggaacgtagttgggtgagtagacgttagagattagggttaaagtgaaagagttagtttagtttgttcgaggtttttttttaatattgaaagttttgtataattatttagttttagtaaattgggagggttggtgattttttagagttttaaggatggttttgttgggcgtgagtttaggatataggaaggaggtcgggaatatttggggtttggttcgtgtatcggaggtcgagtttttttattttgggtttttggatatttatttgtggggttgaggttgtagttggttagtagtagggtaatagttagagggagcgtgtcgcggtttatgttgtttacgtgggggtttgtgcgttgggttttattttgtgtttagtggtagggttgcgggcgggtatcggggtcggcgtgggttcgtacggggattcgaggggagtaggcggtcggagcgacggcgtttttgttttagttttttggggtggcggtcgaggggttaggagaagtggatatagggacgcggggttgggttggagttgttgttcgaaggatgggcggggagggggtgttgggttttaatggatggtagtgatagtagtagttttggttttagggcgtagatgaaggttgtggtatgatcggtagtagggagtttttggtttatttagttcggtcggtttagggaggtaggaaatgcgtttttttagagaaggggttgggttaggtcgtttgttaatcgggtagaggaagtgttacgggttttgttattgggtggggggttttgtgatggggggaggtagtggggtgggaggttttaggttttaggtttgtttttttaagtattttatttttttattttattttttttaaggttggtgggtgggacgtattagggagttttatagatgaaaataattattttaatagtttatcgaggggaatttttagggggtcggttttggttaaagtagtttttgtagaatttgtgatttatttgagtttattgattttattttgtagatgaggaaatagaaattcgatgtgttgagattattggtttaagaagatggtagcgttgggattttgtttatttttattattttacgttttgtcgggtattaaattcggtttattaagtgtagttgatatggggttgtttaataggtaggaaaattgaagtttaggttagggagggaagttttaaagtggtatagtaaggcggttagggttggcgtttttgggtttagaggagttgtttagggttatatattttacgtttgatttttttatgggtggaaaattttttatcgataaaatatagttttaggtcgagtgtagtggtttaagtttataattttagtattttgagaggtcgaggtagacggattatttgaggttaggagttcgagattagtttgattaatatggtgaaaatttatttttattaaaaatataaaagttagttgggtatgatgacgtgcgtttgtagttttagttatttgggaggttgaggttagagaattatttgaatttaggaggcggaggttgtagtgagttgagattagattattgtatttttggtttaggtgatagagtgaggttcggttttaaaaaaaagaaaagaaaaaaaaaaagaagatagttttaaattatggggattttaatggtatttttgaagttacgtggttttgggtttaaattcgattttgtttgtttttagttatgagattttggataaggttttttaatttttagtattttttgtttgtaaagtggggtacgatgtttttttgattaagttattatgagatttttgagggttaggatattatagtattgagttttgggatatataggagatgtttttttattagtgttttttgagttgggtgatagtttttaaattgttttatgtttattttgtaaatagtaagcgtatttattatgtatttatcgtgggattatttataggtagtatttagggttaggtttatgaaagtttagagaaggaattttgggttatttggagggtttggtatttaggtttgttttttgaaagattgggtgagttgggattggggagaagaaggggtgaggaaagtatgttaggtaggggtgttagattaagtaaaggtatagaagtaggaaatagtcggattatcgtgagattagtaggggtgtggtggggataggaagttggagaggtagagtttggttttgtattgggagggttttaaatgttaggattttgtttttagggttattgggagttatggagagtttttgagtagaaggacgttggtagagttaggttttgagaggttaaatttttgtgtgtgttggtaggatttacggtgagatggagttagaaggtttttttttttggatttatttgttttgggttataggtggagaaattgaggtttagggagggaggagaaggttgaggttttgggtgtttttggagggaggatgtttgtttagggtttgaggttttgttttttcgtgtttattggtcggttcgggtgataagagtaggtcgtgtgtttgtttttgtaggagttgttatagcggttgggagggtcggtgtggttttttgggtggggattagggatagttttgtttgtttagttttgtggttgtttggttagtttgtagttaagcgtggttttgaggttaagggagagtgtttttttttagagggttattttgagaagggtattttttttgtttttttttgtaatttcggagataaggttatgggtattgcgaggtaaagggtggttcggtgggggtttaggggtggttttgaggtttttataggttttagatcgagatttgtgttttagggatagttaatttagttttaggagttgagcgttttttttgtattagggttcgttttaggcgtttattttattagttttgaatttttatagttattttaggaggtgggtatcgttatatttttattttatagaggaggaattttagttggagggtggtgattttagggttgtttgggtttaagtttatttttttttttgttattattttttgagttgagtttggagtgagggatagatgtggtaggggttgtaggtattatagggtgttgggggtatttggggtagtgatagggattttataggaggttttttttaaaattttttttttttttttttttttacgttgtatagtttgtttttatttacgttgtaaataagatttaatggattttttagaaagtaggagagattttagatggattttaggaagaattggggtttcgattttagatattttatggaggaaggaagagattgggattatcgcgggtggggggtgaagcggaagttatttttggtttttatagtattttgattttttttgttatatttaagtttgtgtgtagttatttgtatgtatttttttatttgattagaagttttatgaaggtagagattttgatattttttgtattgttgtgtttttagtatagagtttagggttttttagtttttgagatggatttgttgaaagtatgagggattttagaagttaaggtaggggtgggggttatggaggtttagagaagtgggttttgttattggtttttaggagaaaaggttagttttggattgggttttttgttcgaggaagtttggtggttatatggtttttttgttgggtataggttttggggtagttgttttttatattttttagttgtatttttttttttgtgggatatatttatttttttatttttgtagaggttagaggaggtaggaggaggagggttcgttttttagttttttttttgtagggttattgtatattggtggtttttttttattgaaggttacggttttgttggggattttttttatttagttttgtttagttgtggatttagttttttttttggtttttttaggttgagggtggttatagtttacgtcgttgttagttttggggttttgtatcgttttttggggtttttttatatttcgattatatttgtgtaaatagattttttattaaatttttttttaatgattttattggaacgtgttatttgttttttgtcggggttttgattgatacggatgtgtttaggtgtcgtttgtttatacgttcgagagacgcgtggttgatggttaggtttttgtgtttggattttatagagggtagatgtatattttttgtttttttttttttttggttggttaggaaggttagggttgtaggaaaagatagagtacgtttattttggttattggttattgaaggaattttaggcggtttttagggatttattaggcggttgattgtttttagtattggtttggagttaggggttattgataatagtagggttagatttatagggcggagtagggtgtttaggttttgttttatattggttaggtggtattaggtaggatttttgtttgtttgagatagagttttattttgttatttaggttggagtgtagtggtatgattttggtttattgtaattttcgttttttgggtttaagtaatttttttgttttagtttttcgagtagttgggaatatgtattattatattcggttaatttttgtatttttagtagagacgggattttattatgttgtttaggttggttttgaatttttgattttaagtgatttattcgttttatttttttaaagtgttgggattataggcgtgagttatcgtatttagttagatttttttattttttgagttttagtttttttatttgtataaggggagggtagtttgttggtttggaggagtttaaagggtaagataagaattggaattgtattattatttatgaggttgtttggttttgtgttaagtgttattttgtagttattttagtggttgaggttgttatgttagtattttacgatggaagaaattgaggtttaggtttgtaaggttatagggttgggaagaggtagaggataattgaaatttaggttttttttttttggtttttagaatattttgttttggttttttttttatttttttggttattttatttgttttttttttggtttttttttgtttttttaggtttggttgttggttttttttttttttgtttatttttatttttaagttaggttttcgtaaatttttgcgattttggtgttacgttttaatatagattttgggatttagatttaaataatggaaacgtattttgtggttttgtagatagatttgcggttgtgatgttttttagtaatttttaatttgttgtatttttttttattattcgttataagtttatttgttggttttgttatttattaacgagtttcggttataaaatgttatgttttagattgttgttatttaaagtgtggttttgttttttttggaagttttttataaatgtagatttgagttaggtttagtggtaaaagtttgtagtttcggttatttaggaggttgaggtaggaggattgtttgagtttaggagtttaaggttgtagtaagttgtgattacgttattgtgttttagtttgggtgatagagtaagattttgtttttaaaaaataaaaaatgaaggatcgggtgtggtggtttacgtttgtaattttagtattttgggaggttaaggtgggtggattatatgaggttaggagtttga

SEQ ID NO: 59 - DNA, 6392 bp, Artificial Sequence
  chemically treated genomic DNA (Homo sapiens)
aaaatttggagtatttgttaattaggttataaaatgttaataaataaatataaaaataataatgaaatattttgtatatatgtttttaagttgattattttatttgtttttttttttacgtgaggaatttttttttatttggttattttttttgttagatttgtttttttataaagttgttttttttgttgagttttatatattttttttatatttaaaattttgagagtttattaatacgtttaaattgatagagaatgtatattttaaatttgtaagttattttttgagttaaagatatttatttgatgaattgattatgatatatttaaatttttttggggggaggatagaatgaaatttgtaaataaataatattgttaagattgttttatatttaatttaaatgttgatagaaaatcgtttaaattataaaatttgtcgggtatggtggtttatatttgtaatttcggtattttggggggtagaggtaggcggattatttgaggtcgggagtttgagattagtttgattaatatagataaattcgtatgtattaaaaatataaaattagttgggtatggtggtatatgtttgtaattttagttatttaggaggttgaggtaggagaattgttttgaatttgggaggtggagttgtagtgagtcgagattgtgttattgtattttagtttggggtaataagagcgaaattttgttttaaaaaataaataaataaatataaaatttggatataagtaggaatgatgatatgtttaataggaaagggatttttttgttttattttgtatatttagagtttagtaaagaatttagtatttggtggatatttaagtatttgttgaatgaatgaatttttgtttattaaatttagtatatatgttaggtataaagagttatagaaatgaggaattaagagatgtttaagtaaatgatattatatataaaattttaaattatataaatattatattaataagaatataggttaagggtttttattttaaatgattttttgttattaaaataatatttataatttatatttattatttatttattttgttattattgtatgtagataataaaataatatttattgtttattaaaatgaaagttgaaaggtagtttgataagttttacgtttataaaaatagatgtttgttgaaaatattaattttagtttaagatttgaattggaaggtttttttttaaagttatattttttagaatattggtgttatgtgataatttatttagtaaagttttttgtaagttgttttagatagttgatagaagtattttgaatgattaggataatagattttattatattgatttttaattgtttaattttggtttaaatgaattgttggattagtatattgttatttttataaaatgtataattatgattgttaatttttttatgattaattatatttagttagatgttttttaggttttgttgagttattttttttttttttttttagaattttgtgtttttattaatttttaattttttttggtttttttttatattttgttttttatttgaattttgggtaatggttttattgttttttttattattttatatgtataaaataagtttttttgaattatttttaattttatttgttattatgtattttaatttattttttttttgggaaataaatattttgaggaatttgttttaaaaagttatttagtttttgtatgtaaggaaaattattaataattttatcgtatgatgaagtatattttgaattatcgtagaatttagttttttaaaaaaatgttagttagtttttaaatttttgtatttggtttttgttttttagttatttttttttttggtgagattttttggtggtgtagagatagttaattattggttagattgttagaatttgcggtcgagtggtgtttttttagttatgatggatttgtatttttttattaattttagtattatgaaatatttattgtttggtttttagaaagagtttttagtgatagattttattttttgaatattagtgaaatatttggttgtatttatagttttataaagtatttattgatttaaaaggtattaagtgtttattatgtgttgataattgtggaaagggttgagagaggaaaaaaatagataaaaaatttaatttaataggaaagattaataggtaaatatataagtgagattaagtgaagtttttaatgaaaatgagtcggtaaaattggtagtaagtattataaaagtatagtggaagggttgaaatattttcgtagttatttttagattttttattaattatattttattattggttatgtaaagggaatttaaatttttttacgtgtttttttgtttgtttattttaaggattaattattaggatatttttgtttaagaataatgagttttttaaattgtaaagtattttttatattttgtgtgtagtttttgtgtagttttgtatttttttgtattttgtgtatatgtagaatatttttgagtgtttatggatggattaattaattatttatttgatggatttattatttagttttatttttttttattgggagtaggagaaagtttggtgatggaaggaaagttttcggggttagaagattagatttgtattgtgtggttaggtaagttagtttatttagattagttggttatagggtttttatttataaaagaatgtttgtgaggtttttttattttttgatattttaaaatttaatgagaaagggattggttaagttagagagattattgttatagtttagtaattttttgaattttttagagtttttaagatagattatggaggagggaattgttaattgttaagtttgattttattgataggagtaaaaaaaattgtgttaaggttagggaataattttaatagttaatttgtttttgtgaataaattttaatagtgaaattttagatatgtattttttaatggtgttaagtagtagttattatagattaattgttgtttggtattattaaaaagtatatttcgtatcgttaaaaagtagatttggttataattagattagttagggaaaaatatttcgtaatgaaatattatttattacgttttttttttttttttttttgaaaatagtaatgattttagtatttttaaattttgaagaatgttatttcgtattgattaaaaagtttgtgtaaatatttaatatttttttttttttgtttattttaatggatatataaaataaatatttatttaatttattaatatttaaggtatattgtgtattataatttaatggtaaatattttttttattaaatggttgattttgatattgtttaaagttttatatgattttagaaaagttagtgattttaagtggaattgtaataattttttgggttttgtaataaatttgaagtgtaattatttttttttagttatttttaattttagagagtaaagaattatattttaggtggagttgaagattttttagggaaaatgatttaggttagagtttgtataaaaagaggattgtatggtttagttttgtaaatataaattttgtgggttttagagttggtagagagtttaaagaggaaattattaagggtaattttttgtttcgaggaaggaaagtttataagggttaaatttggatgtgttattttagtttaggtaaaggaggaaaattaaaattttgtatagttttattttgttaaaataagtggtttagtatatagtatgtattaaaatgtaagattgatttttttgggaaaacgtgggaaagaaggagagaggaaataaataatttttatattaagaattttttagtcgtgttttgtaggtaatatagagtaataataataaaaatgataggagatattttgataggatggtttaaaatgttatttaatagatgaagagttgtttttatgtttggtaagtttatagtaaagtttagaaggagaagttagaaaataatttagaaaaattaaagtttaaaattagtggtatataattttggttatattttttatttttatttttggtttttttgtatttcggtggaatttagttttatagatgttttttttaatgtgggaattattttttttggaattatagagttgtagatgttacgttggaatttttttagaggtaaattgttagatgtgaggttgtttttttttagttattatttttggtcgtatcgggcgatgtttgagttaattgatttttagatttgtgagtcgagtcggttatatcgtggttgatatcggtatttttatcgttttttttttgtgcgattcgttaagggtttcgcgaggtgggtaggttaagtatttttgattttcgtggggtagaagaagttatcgtggttgggagagggttttgtttatagttatacgtttatttcgttgtaggtttcgagtttttgttttaggtgggtaaagtattcgggaaatgtttttcgttgttcgaggggagtttagagttcgtgttttttattaaatgttgtaaatgtcgttttttttattttattattaaatggaagggaagaatttttttaaggcgtttttttttttttgttatagatttgtaatttatttaagttgtacgtcggagtcgcgggtttgggtgaattcgggggttttgggggattcgggtaattagattcgtttgcgttttttagggtagtttcgcgttcggtggcgcggttgaattattggggtgagttattttttgtagggtttcggagttttttatcgggaggaggcggggtaggggtgtggattcgtcgggggtcgtttatcgcgacggtaagtgattcgggtcgggggcggggagtcgggaggagcggcgggggcgggcgtcgggggcgggtagaggcgcgggagagcgcgtcgtcggttttttatagcgcgcggggtatcggttttttaagattgcgagtttttcgtattttttcgtattttttttggtcggtttagggcgtttttagtttaatttttttagttttacgggcgttacggaattcgttcgatttcgtcgttaattggtagatatggagatttttgtttggtttcgggtttcgcgtttcgagatcgtcgtcgttcggacgtttttgttcggttgggttttcgtttaggtggtcggcgttttaggtgagtggtattagtttttggaagttcggggcgcgttatacgtaggagggaggcgatagttttggttggtagcgggttcgttttggtttttcggggcgtttatgttgtttttcgcgtttacgggattcggttgcgtttatttagttcggtttgaatgaatcgagttcgtcgggcgtcggcgggagttgtagggagggagttggcgttttagatttcgttgtttttttcgttggagagttttgttcggggtgttcgagtaattggattgttgttgtataagcggatttttagttttcgttttaattttggggaaagggttttttagtgagttgcgatttttaatatgataggatttgtgtttgcgtttgtacgtgttggcgtgtagaggtttggatattattttttattatatgtgtatttttttttaataaagagcgtttttggtttttttttggttatttttgttttaggtttgggtagaggtaatttaaaagggttggattgttgtttagattggagtaggtataacgttgtgtatgtttcgtatttttacgaggtgttcgggacggcgtagagattgggatttgttgcgtattggtaaagtagatttttataagaaataattttgatttaatatagtcgacggtgtgataggttatacgttttcgtgggtttttgtggaagttttagtgtagcgatattttagataaaagtggaaaaagtgaagtttggttttttttatttgtatgtagttttaatttttgttatacgtgtgggatttatttttttttataatttattgaaaattttttttggcgggttgaatttgattttttttgagttgagttttggattggtatattgatggttttgggtttttttcggttaagttataataaggttttgtttatgaataattttaaacgaaaatgttaagatttttgtcggtgttttgggattataaggtgaattttgttatgaagaaattttaggtttagaaaaaatttgaagatttttttttttttgataatttattaatgaagtttttgtggttgaaaaataaaaagtgaggtttatggtgatgttaggtgggaaggtgttttatatattaatatattcgagtgttttgaagtgtatgtaataatagttgtttttttgttgtttaaagg

SEQ ID NO: 60 - DNA, 6392 bp, Artificial Sequence
  chemically treated genomic DNA (Homo sapiens)
tttttaaataatagagaaatagttattattatatgtattttagagtattcgaatgtattgatgtataaaatatttttttatttgatattattataaattttattttttattttttaattataaaagttttattagtgaattattaagagaaaaagaatttttaaattttttttagatttagaatttttttatgataagatttattttgtaattttaggatatcggtaaggattttgatattttcgtttgaaattatttatgggtaaagttttgttataatttgatcgggaagagtttagagttattagtgtgttagtttaggatttagtttaggaagagttaggtttagttcgttaggaagggtttttagtaagttatggaaaaagataaattttatacgtgtgataagagttaggattgtatataaatgaaaaaagttaaattttattttttttatttttatttgaaatgtcgttatattgaaatttttatagagatttacggggacgtgtggtttgttatatcgtcggttgtattggattaggattattttttatgaaggtttgttttgttagtacgtagtaggttttagtttttacgtcgtttcgaatatttcgtagaaatacggggtatgtataacgttgtatttgttttaatttaagtagtaatttagtttttttggattgtttttatttaaatttagaataaagatggttaggaaaagattagggacgttttttattaagggaagatgtatatataatgaaagataatatttaaatttttgtacgttaatacgtgtagacgtaggtataagttttattatattgaaggtcgtaatttattgggaagttttttttttagagttaaagcgggagttaaaagttcgtttatgtaataatagtttaattattcggatatttcgagtaaaattttttagcggaaggggtagcggggtttggggcgttaattttttttttgtaattttcgtcggcgttcgacggattcggtttatttaagtcgggttgggtgagcgtagtcgagtttcgtaggcgcgggggataatatgggcgtttcggggaattagggcgagttcgttgttagttaggattgtcgttttttttttgcgtgtggcgcgtttcgggtttttaggggttggtgttatttatttgaagcgtcggttatttgggcgaagatttagtcgagtaggagcgttcgagcgacggcggtttcggggcgcgggattcggggttaggtaggggtttttatgtttattagttggcggcgagatcgagcgggtttcgtggcgttcgtggggttggggaggttgggttgaaggcgttttgggtcggttagagggagtgcgagggggtgcggggagttcgtagttttggggagtcggtgtttcgcgcgttataaagggtcggcggcgcgttttttcgcgtttttgttcgttttcggcgttcgttttcgtcgtttttttcgatttttcgttttcggttcgggttatttgtcgtcgcggtgggcggttttcggcgagtttatatttttgtttcgttttttttcggtaggaaatttcgggattttgtaagggatgatttattttagtgatttaatcgcgttatcgagcgcggagttgttttggaggacgtaggcgggtttagttgttcgggttttttaaggttttcggatttatttaggttcgcgatttcgacgtgtagtttaggtgggttgtaggtttatggtaggaaagggagggcgttttggaagaattttttttttttatttggtgataaagtgggagaggcggtatttataatatttaatagaaagtacgggttttgggtttttttcgggtagcggagggtatttttcggatgttttgtttatttggggtagaagttcgggatttgtagcgaagtaaacgtgtggttgtgagtagggtttttttttagttacggtggttttttttattttacgaaggttaagaatatttggtttgtttatttcgcggggtttttagcgggtcgtataggagaaaggcggtgggaatgtcggtgttagttacggtgtgatcggttcggtttataggtttgagggttagttggtttaggtatcgttcggtacgattagagatagtgattgaggaagagtagttttatatttggtagtttgtttttgggagaattttagcgtgatatttgtagttttgtggttttagaaaggatggtttttatattgaagaagatatttgtgggattgagttttatcgaaatgtagaggaattaaaaatgaaaatgaaaaatgtaattagagttgtgtgttattagttttaagttttggtttttttaaattattttttggtttttttttttgggttttgttgtaaatttgttaagtatgagaataattttttatttattgagtggtattttaagttattttgttaaagtattttttgttatttttattattattattttatattgtttgtaagatacgattggagaatttttagtgtaagaattgtttgtttttttttttttttttttttacgtttttttagggaagttagttttgtattttaatgtatattatatattgaattatttgttttaatagaataaaattgtgtaaaattttaattttttttttttgtttgaattgaaatagtatatttaggtttagtttttgtagatttttttttttcgaagtagaaagttgtttttgatgattttttttttgagttttttgttagttttgaaatttataaaatttatgtttgtaaaattaagttatgtaattttttttttatgtaggttttagtttgagttattttttttaagagatttttagttttatttgggatgtgattttttgttttttgggattgaaggtagttgaagagaaatagttatattttaggtttgttataagatttaagaaattgttgtaattttatttggagttattgatttttttgaaattatatagggttttaaataatgttaagattagttatttgataagaaaaatgtttattattggattgtgatatataatgtgttttaaatattgataaattagatgaatatttattttgtatatttattaaaatagataggaaagagaagatgttgggtgtttgtataggttttttagttagtacggaatgatattttttaagatttaaaaatgttaaagttattattatttttaagaagagggaggaagaaaacgtggtaaataatattttattgcgaagtgtttttttttgattgatttaattgtggttagatttattttttgacggtgcgaagtgtattttttaatggtgttaaatagtagttgatttataataattgttgtttggtattattaaaaagtatatatttaaaattttattgttgaaatttgtttataagaataaattgattgttaaaattattttttaattttaatataattttttttatttttgttagtaaagttaagtttagtagttaatagtttttttttttatgatttattttggaggttttgagaagtttaaaaagttattaaattataataataatttttttggtttgattagttttttttttattggattttaggatgttagaggatgggagaattttatagatatttttttatggatgagaattttgtggttagttgatttgagtaaattggtttgtttaattatatagtgtagatttggttttttgatttcgggggttttttttttattattaggtttttttttatttttaatgaaggaaagtaagattgggtggtaaatttattaaatgaatgattaattaatttatttataagtatttaaaaatgttttgtatgtatataaagtgtagaaaagtgtaaaattgtataaaaattgtatataaagtatagaaaatattttgtagtttggggaatttattgtttttaggtagaaatattttgatggttagtttttgaaatagatagataaggagatacgtagaagagtttgaattttttttgtataattagtgatgaaatgtggttgatgagaagtttgaaaataattgcggagatgttttagtttttttattgtatttttatagtatttgttgttaattttatcgatttatttttattgagaattttatttaattttatttgtgtgtttatttgttaattttttttgttggattgggttttttgtttgtttttttttttttttaattttttttataattattagtatataataggtatttaatattttttgagttaatgaatattttataaaattatgagtgtaattaaatattttattggtgtttaagagatgaaatttgttattgaaaattttttttaggggttaggtagtgagtgttttatgatgttgagattggtaagaaaatataaatttattatgattggaaaggtattattcgatcgtaagttttagtagtttaattagtgattagttatttttgtattattagaaaattttattaggaggagagatagttgagaagtagaaattagatatagaagtttggaaattagttagtatttttttaaaagattggattttacgatgatttagaatatattttattatgcgatgaggttgttgatagttttttttgtatatagaggttgaataattttttaaaataaattttttaaaatgtttattttttaggaaagagataggttaagatatatgatagtaagtaaaattgagaataatttagagaaatttattttatgtatatgaaatggtaaaaagagtaatgaaattattatttaaaatttaggtaaaaggtaaagtatgagaaaaggttagagggaattaggagttagtaggaatatagagttttggaggaaaaggaaaaaagtgatttagtagaatttaagaaatatttggttgggtatagttagttatggaaaaattggtagttatgattatgtattttgtgaaaatagtaatatattagtttaatagtttatttagattaaaattaaatagttgaaagttagtatgataaaatttattattttggttatttaaaatatttttattaattgtttagaatagtttataagaagttttgttaaatgagttattatatagtattagtattttgaaaaatgtaattttagagaaaaattttttaatttaagttttagattgggattggtatttttagtagatatttatttttataaacgtaaagtttattaaattattttttaatttttattttgatgaatagtaaatattattttattatttatatataatggtgataaaatagataaataataaatatgaattgtgggtattattttagtaataaaaagttatttaaaatgaaaatttttaatttatgtttttattaatataatatttatgtgatttaaaattttgtatatggtattatttatttaagtattttttaattttttatttttgtaattttttatatttgatatatgtattaaatttgatgaatagaaatttatttatttaataaatgtttgaatgtttattagatattgggttttttgttagattttggatgtatagagtaaaataaagaagttttttttttgttaaatatattattatttttatttatgtttagattttatgtttgtttgtttgttttttgagatagagtttcgtttttgttgttttaggttggagtgtaatggtataatttcggtttattgtaattttattttttaggtttaaagtaatttttttgttttagttttttgagtaattgggattataggtatgtgttattatgtttagttaattttgtatttttagtatatacgggtttatttatgttggttaggttggttttaaattttcgattttaggtgattcgtttgtttttgttttttaaagtgtcgggattataggtgtgaattattatgttcggtagattttatggtttgaacgattttttgttagtatttgaattggatataaaataattttaatagtgttgtttatttataaattttattttgttttttttttaaaaagatttaggtgtgttatgattagtttattaaataggtatttttaatttagaaaatgatttataggtttaaaatatatattttttattagtttgaacgtattgatgaatttttaaagttttgaatatggaaaaaatatatgaagtttaataagaaagatagttttataaaaaggtaagtttagtagaaaagataattaagtaggaggagattttttacgtaaggaaaaaaataagtaaaataattagtttaaaagtatgtgtgtaagatattttattgttatttttatgtttgtttgttgatattttatagtttagttaatagatgttttaaatttt

SEQ ID NO: 61 - DNA, 18988 bp, Artificial Sequence
  chemically treated genomic DNA (Homo sapiens)
ttattgaaattcggaatgtagttggtgagatttaggaagtgttttttaatttagtttaattggaagtagttatagggggtaagtggttgtttattatattagtatagttttagaggttttgttaaaagttttttgtttattttattttgaaaattagttattttgattaatattattaattgttatttataagtttttgttatttgtgatttttattttttttaagtaatttggtttatttattataattttaaagtgagtatagtaaattaaatggattttagcgagaagtttttcggggtgaatttattgtgaattattttgaggatttgtaatatgtggttaatttttaattttaattattgatataaaaggagagagtttgtgtagttgaaatagggaagtaggagaagttcgttgggtattgatagattggttttttaagttagttttttttttttttaggaatttggtattttttagttgttttcggggtttgtaggagttttaaaatttttttttatattttttcgtgttttagttttttggattttttttttttttttaaattaaaatgtattttgagggagaggtttgggtaggaggattttttgagtttaggagatttgatttgagtttggagatttgtttggtagaatttttaattagtggtgatgatgttgattttatggattaaaaattgagatattgttaagaagtgagggaagggagcgggggagggtaggaaaattaatattgtttaagtatttattatgtgcgtgttagatattttatatgatgtttagtaaaaatgttttgtttgtatgaataattgttatttttttggtaagtagagtgtagtatgttttttttttgaatggataaatatatgaatatatttttattatatgaagtagatattagttttatattatagatgaggatattgatatttagataagttatgattttaaggttaaatatatataatattttaattatttaattttgttttttttttattgtttagttttttgtttagttttttttgtgtttagaattttgtttttgatttttgtaaaagaacgattagttaaattgattaatatatttatattaacggatgtaaatatgatagaatcgtttttagtttttttttgtaaggattttgaatgttaatgataattttttggggataatgttaatttatagaaatggttttttcggaattttacgttgttcggggaggtattttggtattttagtggtattaaaaatatattttatagtagatatttttttggaggttggatatttatataaagacgacgtattttttataaattaaattttaatagtgtttgtatttatttaaatggatattatttcgaggaggagatagtgatttgcgtattagtttttattattagggatgatttgtaagatatattaggaattggttttttttttattttttcgttttttttttttagaattttataagttttagagtacggttaagataagaggagtattgggaaagaatttgaaaataaaaatatagtttcgtgatttttaatataaagattacgaagagtataataataagtcgtgaaaaaaaatttatatttagaagttggagggttataaagtataagtcgtttaggttagtttgtagagattgtttatgttttcgtttagtaaaaatttggtaggcgatatatcgcgacgaatttcggttgtagaagaggaagagtattatttgtagttcgcggcgtgggaaacgtcgtcggaggggtttcgcgagtcggggaagtgcgcgtagcggggttttaggcggttttaggcgttgagtgcgaggaacgttcgcgttcgtcggcgttcgggagacgtagtcgaaggaggagggcgggcgttttattcgcgttatagttgcggtcggttagagagatcgtagaggtcgggattttcgtagtttttacggtcgttgttgttattgtcggggtggcgcgtttagtcggagaatttcgttcgcgttcggggttgggggcgaggcggggcgttgacgttatttttttttttttatcgtttttaagggggagggagtggggaaagaggtagcgagtcgtcgtagtcgtcggtcgtaattttttaattcggcggttggttgtttgggtacgttttgataaatttggttgttttcgggttttcgtttcggtttcgcgtatttttttttcgtttgcgtttggtgtttaagtttgttttggtcggaagttttcggagatgcggtcgtttgggtttcggcggtacggacgttggtattttggttagggatatgttgaagatttcggggaggtaaagttggtattttaaattcggtttttaatatatatttatatcgcgaggggattacggagttgtcgaggattttagagtttagggtcgaggattcggttagattggtgagttttttgtttaaatcgtgtatgttttttggtatttaagtttaaacgttaatgaaattacgtggggtgtgtggttttaagcgagtgcggggaagcgtgtgcgttttacgggttttcggttttaggagttgcgtatttttttggttttgtgcggatcggcgatgaaagattcgtatgtatagttttgggagtttataaaatatatatagagtattgttaaaaagaatttgagaggcgatgttgtttgtgtattattttgaatgtaatttattatagtaatggtgtttagggagggcgtatcggggtcgcgagatttgtaggggcgtagcgttttttagttcgggtatttggcgaggcgcgttttttgtagggttttgtgcggaggcgaatttggattttttcggcgttcggcgacgtgggcgtttgtttattttagtttttattgattatttattcgggtttattttttatatgagttataaaaattagtttgggtggattggatgtagaggtcgtgttggaggaaagcgttttgtttttggaatcgtttttttaattttttttttaatttttacgagtttttggggatagggttagggagggtcgattatttaaaggataaatgtggaatttgaattatattttttttttttatataaaataattcgatttgtggtagttaataggtatgtttatttcgttttgttggcgtttaaggattagtagaatcgtggtagagttttaagtttgaaatttttatttttggttttcggcggtttttgtggcgacgaagtgtaattttttttaggtagatagattttttagggagtttggaaaatcgggatttttagatagatgtaaaatatttagtaagttttaggaagcgttattatttattaattaatggtaattttttttaggaatttttttgtgttatttaaaaaaaatttcgtgattttacgttagggaatggtatttttgtattttttttattgttttttttttttttttttagtattattttcgttttttcgtttttaggaaacggttggagtttcggtgtgtttgggttttgttgagatttataattcggtaagcggtataagtcggttgggtttggagattaggttatttattttcgaggtgttttatgtatgaaattgatttgtaagtatttggagtaattatggtcgggataaatacgtttttggatgatggagtttgtatttgttggatgtgtgaatttatgtgtattttaattggtgggtagggaatatagggttacgaatcggtatatttattttgtaggtattattttttttttttagttataatttgttagatatttttattattattatttttttcggttatttttaagatggtttataaggtgattgcgttaattttgaatttaggaaatttttttttatatttgattgttttgtcgttttttttttcgttaagttttttttattagttttagggaaatcggatttttttgtttttttagtgttaaaatgtttgagttttataaatttttcgagattaagttcgtttttttgttcgggttgcgttttagcgttttcggtttttcgggtttcggtcgagttcgttttgcgtcgagtttgcggttggagttttgttcgtatcggggatgggtttcgcgttcgggacgtttaggttgggcgttcggcgcggggagttttcggagcgggcgtttcggcgttggggttttttttttgtttaggaatttgtagttgtcggtttggggttacgttttggggtttttggggtcgattttcgggttaggaagttcgcgggacgtcgcgattgttttttgttttataggtttgggcgttcggggtgttagcgggggaggttaggcgttcgcggcggggagggtttggggtttaattcggtagaaaaaggtcgcgggggaagcgttttttttttttggggattgaaggaggaagtagatttcgatttagttgtatttttttggagatttgaaggacgattttagtttattaaattttcgcggatttagagtcgcgttatttaaatgtagatttaggggtttttatatttttatggaaaagttaaagggatgtttttgggaagtttttttattaggttttagtattttttttttttttttttttttttagttaagttaacgttttttttttttggtagggagttttttttaattttttgtatagcgtttgtggttggtcgtaattaatttcggtattataagtttcgttttgtttttcggagtcgcgttagatttcgttgggcgttttttcgttttttagtacggatttggtgttcgtagggattggggttttttgggttcgggcgggattgcgtggtcgaattcgcgggtttagagtcggtagtcggggaaagtgggttcgagttttcgcgttcgagaaacgagcgtcggcgtcggcgggcggggtcggggcggagggattttttgcgttcggggagcgtgaggcgtcggcgtcgagttgggcggtcgggcgcggggagagggcgcggggagagggcgcgggagcggttcgcgcggtaggtattatgcggacgcgcgagttcggcgagggtttcggtaggttcggtttttgttcgggggcgcgttgagacggcgggtgagttttacgagagcgtcgtcgttatttcgggttaattttgcggttagttcgttggggcgcgggtcggcgggcgggggcgagagcgtgtagcgcgttgcggtgcggattttgtgggtgttcgttcggttttcggttcgggtttcggcgttgtcgaaaacggatgagcgcgcgatttttcggagggtggagtgattcggttttttttaattgggaaatttagtattggttaggggggtttcggcggcggagcgggaaaaggaggcgatcgcgcgggatcgattcggggttattgttggggttcgattttttttgatacgtcgtttttttttcgggagttcgtcgggttgcgtcggtttcgcggttttttggggtatttcgtcgtttgcgaaagattcgttcgttgagcggtgtacgcgggaggtttgcgcggggttgtcgggtttttgggtttttgggtgtttgcgttttgtaggagcgttgttcggaggtgtagatgtaatcggtggattgcggagtgaagggttgcgaggttgtatttcggggttgaatatttgtataatgtgcggtttgttagtgttttttgttttttttggaggaggaatttttaagatttttttaaaagaaagagtttttggttttttattgtttttaaaaaaaaatgtttttttttagagagttagttttttgttgtgtgttagatttttttgttttcgttgatgtgaattgtaaggttttggaaataaggacgtaattgtatgagttaggaaagtaaatttataaatattttttatgtagttaagttttttttttgtttgaattgtggttttattaagtggtttttgttaagtaattttcgggtgtttgatagaggcgattttttaaaagtggatattaatagtgattattagtatgagaaaagattgaaaagaaaatgatttttagatatttattttttttttaaaagtagatttttaatgtttcgtatatttagatataggtttcgatagtttaagaaggtatttgtgtgtgagaattaggtaatggtgatgttttttatattatttttaatgagtttggttatgttgtttaatatatttagttgttatagggacgtttgaaaaggtgtttttttagttaatagttaattgtgatatttgtttttgtttttttgttttaggaagatagttttgattttatagttagaattatttttttgtatttaagatgtaaaaatatttaaagtattatgtaattttttaaaataataattggtataagttttgagtgatgttaaatatggtatttaataagtttaaggtaaggtttgatttgaatgaagtttgtatttgtataattattttttgaaaaatgaatattttaaatgagttaaattttttggtattttggaaagaagtgtggttgttagaggattttataaaattatttcgggttatttgtatatttatttgttttttttgaagtattttcgttgggtttttattatgttagtagattatttaaatttatggttcggataggtgttaatagaaaaatgtttaaaaattatggtcgggcgtagtgttttacgtttgtaaatttagttttatgggaggtcgaggcgggcggattatcggaggtcgggggttcgagattaatttgattaatatggagaaatttcgtttttattaaaaatataaaattagcggagtgtggtggtgtatgtttgtaattttagttatttgggaggttgaggtaggagaatcgttttaattcgggaggcggaggttgtggtaagtcgagatcgtgttattgtaatttagtttgggaaaaaaaaagaaaagaaaaagaagagaagaaaaatttttaaaaattatgtataaattaattttgtttttatttttttgattattttttatttttttattgtttttagattttgttttgaggtttttttgaagtagtcgtttttttgaatgttagaggtggataggattttagagattatgttttaatattttattcgtttgttttttatttaagtttggttgattttacgtagaattaattagttaaattaaattagtatattattattgtattagattttgttttagtggtataatttgtagtttaaaggatttgatttaatagtagggagtcgtaaggttggatgtgttgtttaatttttatgagcgggatttgcgttagataattgtttttttgattaaattatgtagaagttgaagttaaattttattttttggttttatttaattgtttagtttgtaagtgtttatttatttttagatattggagaagagtttttgaaatgagtgatatatattagttaagattaggaagttgttatttttttatatttgaggggaattttttattttaaaaatatattttgatgaggaatttgtatattttatttttttaagttttttaagttattttttattgtaagttttagatttaaatatattgtttgaatttttgtttaattttaagggtttattatgtatgtgaagataagtttataaagtaaaaataataaaggtttttatatattgtttaggaaatattagttatgatttaatttgtattttttatagaatattaaggttagagttttgtgataatttgtaatatagatattgatttggtattatttatagttaattttgaggtagcgtaaggtgggtggtgatttttttttgagttattggaaatgagttttttatagagtagttatttgtagtgttgttattagtttcgtggttgtgtttggattttttgttaatttgagaaggatggatgttttatttttttatgttatttttttttatattttttttttaatatagttttgttttatattttttatttttaacgttttatttatttgtttatttattaatttaataatagtggattttttttgtgttaaatattgggttagatataatatttagtgttgaataaatcgtgttttttgtttttaagtagttcgtagtttgataagggagaggataagtatatagttttttatagattagtgtgataagagatttatttaggttaaggtggtttatagtagtattttattgagttgggggatttggggtaggtggatttaggataatgtgagttttgagggaagtgtgaattagaggggaataatttaagtagaggaaatgatgtgtgtaaagtaagttatagaaagtatagtgtggtttgtggtgtgatgagtgtagagaaattttgaagattttatcgtattatgttattttaggaaaaggattggttttttttttttgtttaggtagaatatagagaattttgattatgatttaaataattttatttaaaaagggaggattgtttttatgaggtagaggttaaggagagagaaaaagaaagaaacgttgaagagaaaggtgaaaataaataagttgtatgtgaggagtggagggtaggaaataaagaaaatagtaatgtttgtattatttttcggaagggaagaggttaagatgttatattattttagagtttttattattaggtggtgttattggtttaagatagtttggttattgaatttgttgtaagtttgggaagtatgtttttttgttttgaaataagaagtagtgttgggaaattaggaaattagttagaggttagattattaaaggtttttaatgtaaggttaagaattatatatttagtaggttaaggggaaatattgaatatttttaaattaaagaataatattataaagaagtttgaataggttgattgggattgggggtagaaagtaggaatattaaaagattgtaggaatattttgtatgaataaaatatttattttaattaggtggtagtagtagaaatgtaaagggaattattttgagaaattgagaaagaaatgttaagtttggataatttttgagaaatgaaggtttgagagttaggaggttgtaaagattttagtttattttttaatttttcgaatatatggagtcgaaaggattaagtaagttttttgaatttatatagttgattagtgataaagttggagttaggttttatatttgatgtttttttaatttttttttttttgtttgatttgttagtttgtaaatttggttgatttgggaagtggtgagattggaaaataattggaagagttgttattttgtaatggcgaaagggtgaaaagtttatatagttgttttttggtttttaagggaggtttgggattttatatttaaatttgagaatgtttaagtttttgatataaaatggggtattatttatatttttattgttttattgtttattttaaagacgtttttaatttgaggttggttggatttatggatgtagaatttttatatagtgaaggttaatcgtataatttaggtttgatggtattttaggaggaatgttacgaggtgtttgagagaggttagagttgaaattgtagatttggtgtattgattttttatgatttgaggtagagtagatgagatttttaagggtggtaataaatgtatgtggaggaagagttggaagataagtttgtaatgttagagttttaggtgagttagtgtagagtataaaagagtatggaagagaattaggagaatgttgttatttattttttatatttgtggattgtttttttgttttgggggattttgtgatcgaatgaaggattaggagtgttggggaggggagtgagtggtgttaaaggtgttatgaaattaaggaggatgagtattgagaaaaggttattggtttgatattagtttgtgatgcgggaacggttgttttgttagggtggatttgtaggatttttgtggagtagcgtttggcggagagggagttttaaggaagttagggcggtgttgtgaaatttttttttttgcgatttttgttagtataaaaaaagagaagaataagagtgtttgtttgaaagaagtaaaggtttgaatgaagtttattttattttattttattttatttttttgagacggagtttggttttgtcgtttaggttggagcgtagtggcgtaatttcggtttattgtaagtttcgtttttcgggtttaagcgatttttttgttttagttttttgagtagttgggattataggtgtatgttattacgttcggttaatttttgtatttttagtagagacggggttttattatgttggttaggatggttttaattttttgattttatgatttgtttattttagttttttaaagtattgggattataggtatgagttatcgtgtttggttaagtttattttttaagtaggagaagaatttgtgtgtgtgtatggattttgtataaggtgttaggagtgggaggagttgtagaagaggtaggattttgtggtattagagtatttttatttgtagttagggtgggtggtattttttttgaggtgtaagaagagagaataggtgaagagaatattttaagaagaggagggaagatggatttttttttttgaagattttcgtttttttgttgtatatggaatatttatttttttggttcgttatttagtgaagggttgatcgaatttaattatatagggagtttaatttaacgtataaaataaagttttatttattaatttgggagtggaagaagtggttattgttgattattggttattttgttaagatgttatttaaattatttttatttgtggagaaaaatatattagatgagatgatttttatttataagaggttaatagtttattgagtttttttttgggtaaagtttgttttggaatgtggatgaggagaaagtggttggaggataaggaatatatagagaggggaaagaagagaatagtataggaatgttttattttgttagaaatagatatatagtcgttgtttatttgttttgttttgtcgtttttaggagtatagaataattagaattcgttattttcgtaatgttaatagatatgttttataggtttatgtagataattaggttttatatagaggttgtttgaaaaataggatatttgtttattttttttaagggtaggaatattttaggaatttattttggattgattaaattatgtatatggtgaagttttttgaaaaagttagattgtagttttatattgttattgttagtaaagattatttttagggttaaattggaatcggttgttgattatgtgaaggtaatatttaaagtatgttttgttagagttattagattattgtagttttagttaaagataataatatataaatggagttagtagaagtgattaaatgatatatattaagtttaaggttgttgtttaatttttagggttatagtttttttcgtttatgttgaaaattatatgaagatgggttgaaaagaattagtgtatatttagaaaataaataggatttatttattagtattttagtgtaaggatgaaagtttttaaaagtatcgatatggttatgataattgaattagaaaaatagagagtttttttttttttgttgtaaattttatttggaatgtttgaaattttagaaattatttaatattttttttaatatatagtatttttaaaaagttatttacgttgggtgcggtggtttatgtttgtaattttagtattttgggaggttgaggtgggtggatgatttgtagataggaattcgagattagtttggtcgtttttattaaaatataaaagttagttgggtatgggggtgtatgtttgtatttttagttatttaggaagttgaggtatgagaatcgtttgaatttagaaggtagaggttgtagtgagttacgattgtatcgttgtgttttagtttaggtgatagaataagattgtttttaaaataaataaataaataaaaaaattcgtttataatttataattttttgataattttatgattttgttttgaaaatgtgtttgtcggttaggtttagtggtttataattgtaattttaatattttgggaggtttaggtaggtcgattagttgagtttaggagttcgagattagtttgggtaatatggtgaaattttatttttataaaaatataaaaaattagttgggtatggtggtacgtttaggtatttcggaggcggaggcgggaggattatttgagtttggaaggttggtgttgtagtgagttatgatggtgttattgttttttagtttgggagatagagtaagattttgtttcgggggaagaaagatgtttgtaatttagagattttttaaaaatattttaaaaatgtgatattgaattgaattcgaaattttaaattttaattatgagttaaattttattgacgtttttattatgttgatagaaaatgagagtggagaagagtatagtgagggagaatattgagtttttaatttaataattttgtgtttttattataatatgtgaaatgaaaagtttaataatgttttgttttataaaggttagaatgattatttgtgtttgtaagaattgtgatcgtttagtaataaatatgcggcgtttaatagaattggtgtattgtgtgatgttgtgttttatttaatgttttgtttttgtggcgtgtgaaatttttcgaagatttgagtttgaggttatttaaatatttgaatatatgtagttaggtttttagtataggggttgtgttttgttttgtgaagaatgtgtagttatagtaattgatggaagtattttatatgaaggtttttttaatgaagaaatatgaagatattaatatttgatttttattgtaaaagttatttttttgtcgtatttatagatttttagagatttatgttaaagatatttaagttttagattgggagttttttttttttaaggttagattaagtaaatattttttgttttggtttcggaaaatgtattttagaaattttaaattgtagtgagtttaagtagtgtgattattttttaaatattaaagtatagtttttggtttagatggtttttggagtttaatttttataagtaaaggagtttaggcgataaggttttttttagatgaaatggtgttggagttttttttcgttttagttttattgtttgttttgtatgagagttatagttattgttttgattagggtggtttttatagtgaaatttgaattcgtggtttttggttatattattgtacggttaataatgttttttaaaaagtgtatttttttatttaataatttattttatttatagtagtattttgttagttaagtttgtagagtatatttaggttttttaaagattttagttaggaatgtggtttataagttcgttttagttgtattgtgtttcgtgagaattgttgggtaggatgtggaaggtaattgtatgtttgggaatttagttggggatgagtgggtggtggtgggggttgtggtgggattgagtatttgggatagtatggggagagaatagttaaagtagtttgacgtgttggttatggtttgtgtgttttaggggatggaatagtgttagagttttttggtggggggatggagggggaagtagcgtggcgtattagtaagtattttttttttttgtttttgagatagagttttgttttgttatttaggttggagtgtagtggtgcgattttagtttagtgtaattttcgttttttttgtttacgcgatttttttgtttttgttttttaagtagttgggattataggcgtttattatcgtatttagttattttttgtatttttagtagagataggggttttattatgttggttaggatggtttcggttttttgatttcgtgattcgtttgtttcggtttttcgaagtgttgggattataggcgtgagttatcgcgtttagttggattagtgagtatttatattatatagaattttaagttttaatgttaggttttagttgtagaaaaatttttatttatttattgttttttattatattattatgttgtggttttttttttttttttagtggtcgatattttttttgttagggtttttcgtttggattttttaaattttggggttttgtttttggatttttttttttttttgtttgtttttttttttggtgattttatttagttttgtggttttaaatatcgttttttatatttagataatttttaaatttttatttgtcggttggagttttttatatatttgttgtttatttataatttttatttggatagttcgtagttgtttttattttattttgtttaaaattgatttttcgatttgttttttgaggttgtttttttttttgtttttttttcggtttttggtttttttgttttttacgttgagtagtttttggtattttttttggtattgttttttttttttttttttttttttttttattttagtgtattaggtaattttgaaatagatttataatttgttttttattttcgttgtgttttagtttatacgcgtttcgtttgtgttgtggttgtagtttttgattgttttggtcgttttttagtttttgttttggttgtttataggtttttttattttattgagatcgtggtatttttcggtttagaattcgttgggggattttttatttgatttatattaaattttaaagttttaaaaattgttttttatttatgagtttagacggattttgagaaaaaaaaagatttaggttggatgtagtggtttatatttgtaattttagtagttcgggaggtcgagttgggtagatcgtttgagtttgggtgtttgagattagtttgggtaacgtggtgaaatttcgtttttataaaaaaaataaatatgagttaggcgtgttggtggtttttgagtatgtaaaattttgttagtttaaatttatagacgtatttatagttttagttatttaggaggttgagacgggggttcggaaagtttaaagttttcgtgagtcgtgatcgcgttattgtattttagtttgggtgagagagcgagattttgtttaaaaaagaaaaaaaattgaataaataaatggaggaagatagataaattagtttttagaagaattataaatattttgagtagcgaaattttttgttttttaagaatgggttatatgtagtgatttttttattaagaatatagtatagggaggggtgaaagtaatttgattgtgaggaaatttggtagatattattttagttacgtggttaggagtagcgttaatatcgataaatcgtgttgattttattcgtttgttacggtgtggtggaaacgattttatttttgtggtttttttttttaaaatagaattttaatttaattaggagagaaacgttagattttagttgagggatattttataaaatatttgattagtatttttggaaattgtttagattattaaaagtaaggaaaatttgagaaacgtatattttagaggagttttaggagatatgatagttaaatgtaaggtggtgttttggaagggattttaggatggagagaaggttttgggtaaaatgagtaaatttgagtgaagtatggattgtagttgatgatgtgttagtattggtttgttagttgtatttagtataatgtataaagtgagatgttaatagtaggggaagttttttttgtaatttttttgtaagtttaaaagtattttaaaataaggtttatttttaaaaagaattttttttatgataggtttttttttaggatgtgtttcggttttatcgttgttttttaatcgttgtgttttagttacgtggtttttttttggtttttttaatttagtgtttttttgcggggtgtgattttttgttttagagggtgtttggtaatgtttcgagatagaggtatttttagttattatagttgggtgatgagggggatgttataggttttatgttggtggggattaggaattatattgaatattttacgtttttttaaagaatttaagagttgtttagtatgttattagtgtaagttttgattttttggatttagggttttttttttttttttaggtttttgattttggtttttttttgttttgttttagttttttttttagtatttaattattagtatcggatatattttgtttatttgtttgtttgtgtttggttaggaaatgtattttttattaggatttgttggtaatttggtttatttttgaatttttagcgtttagaattgtatttgatatatagtagatgtttattaaatttatgtaaaaggaattaaataattaatgaaaggggtgagtggatgataaagataatatatatttatgttaaaaaaaaattatagtagagaaaaatgttatagtaattatttttttagttatttgtttttttatcggttttttagaagttattattgttaatagttgtttgtttgtttagatttttttgtttattttaaagtatattcgtgggtatattgtatttattttttttttttttttttttaaataaatataaataggattagtttcgtttttttagtttatatagttagatatatgttaatatatagagtgttattttttaatggttgtatgataattttatacgtagaattaagtaaaaatatttttagtatttgtaatagaattttggtataatattttgttgtataatggatgatggtaaaaatgttttttaaaatataatgtgatttttaaaataaaagatattgtttgttaaatattatttaagtgtttttggttttgtttttttgtttttgagatagagtttagttttgttgtttaggttggagtgtagtggcgcgatttcggtttattgtaatttttgtttttcgggtttaagtgatttttttgttttagtttttggagtaattgagattataggtttgttttattatattttgttaatttttgtatttttagtagagatggggttttattatgttttggttaggttggtttcgaatttttgagtttaagggattcggttgtattggttttttaaagttttgggattataggtgtgagttatcgtgattagtttttttatatgtatttttatttttagtttgtaaattttttgggattgggatttttgttttttattttttaatattatgtaaggttttgtttgataaggttttttatatttgtaggttgaattttttatttgttttgataaaattataagattattttataatatttaaatttttttgagtattagaattgttgattaaatggagatatttaaagagatagttttgggagaaaattgtttttttattttgtttaaatgataattgtttttttagaagttaaaaatttgtttaatttttgattttatttggagaggagaaggtattatagttaaagaataagttagggtggttaatttgaacgtggtttaatattaattaagttttaattgttttaagtatattaggtttttttttttttttaaggtaatgatttatggggtagagttggtagtagttaagttaagatattataaattaatgttgtcgtattaattttaattgggttgttaaatttattttttagtttgttttttatttatttttggtagtatttatattttgtgaatattaatttgagagttattttgtaagatgatagtgttgttttttgtgaagttgtgttgatttataagatgaatttgttggtaaaggggaatagttgatttgaaaataattgttttgtttttttggttagattttagtttagtggatttcgtttatttttttatttgttattgttaaaggtaacgttttttttatttttttagtttttttttttttttcgttagttatttagggattgttttgtagagtttgttattatgtattaatagattgatttgatttttgacgtgtgttagtttagaagatttagtttttgtgtgtgtgtgttatttttttatggaggggtttagggtgataggttgttcgatgttttgaagataggagatattttgtgaataattggttgttgatagtagtggtgataaaatattgatatagttggtaaagtttgttttattgatttagagaggaaaaatgttgtttgatattaggttgttgaattttggttttttttttgtaaattgtttttttttggggtttatgttgttgataagtattatatttgatataattattttaatatttttaagtagttatatagagcgaaatgagataataaatttttatattatgtagggagtgaatttaattatttttatatagaaataatataattttaggatatattttgaaatgagattataagttgtttttatggagcgttatgtaaaattattgttggtttttgtttttttttgaattagttgttagaagttttgtatttttataatattgtaggggtattatgtttgttagtttttgattatttaatttattgtatgtaagtaaatgtaaataatgtttattaatttttaatagttgtttatatttgttttaacgatttaaatataaaaatataatttagttgttatagttagtagttttttatttgatatttatgaagatttttgagtcgtttaaatatgaaagagaggattttgtcgtttaaaaatgaaaaggaagtttttgttaagtttaataattttagatatgttataagaatgttgatatttatattggaaaatatgaaaaatattttaaatcgttgtatttatttatattttatgtgtatggaaaatatttttttaatgagaagtttaaaataatgtatatatttttgtttgttttatttttttaaggtaacgattttgattttttttgttttaga

SEQ ID NO: 62 - DNA, 18988 bp, Artificial Sequence
  chemically treated genomic DNA (Homo sapiens)
tttgaaatagaagaaattagaatcgttattttggggaaataaaataagtaaaagtgtgtatattgttttaaattttttattaaaaaaatattttttatatatatggaatataaataaatgtaacggtttgggatgttttttatgttttttaatataagtattaatatttttgtaatatgtttagaattattaagtttaataaaaattttttttttatttttgaacgataaggtttttttttttatatttaaacgatttaaaaatttttatgagtattaaatgaaaggttattaattgtaataattaagttatatttttatatttaaatcgttaaggtaaatataagtaattgttaaaaattaatgaatattgtttatatttatttatatataatgaattaaatgattaaaagttggtaaatataatgtttttatagtattgtgagaatgtaaagtttttgataattaatttagaaaaaaataaaaattagtagtggttttatatggcgttttataagaatagtttgtaattttattttaaaatgtattttgaaattatattatttttgtataagaatggttaagtttattttttatataatgtaagggtttattgttttatttcgttttatgtaattatttaaaagtattaaaataattatattaagtataatatttattagtaatataagttttaaagaaaggtaatttataaaagaaaaattagaatttagtagtttgatgttaaatagtattttttttttttaagttagtgaagtaaattttattaattatattaatgttttattattattgttgttaataattagttgtttatagaatgttttttatttttagggtatcgaataatttgttattttgggtttttttatgagaagatgatatatatatataaaagttaaattttttaagttaatatacgttaagggttaaattagtttattaatatatggtggtagattttgtaggatagtttttgggtgattggcggagaaaagagagaaattgaagaaatgaagaaaacgttgtttttaataatgataaatgggaaggtgggcgaagtttattgggttgaggtttggttagggaagtaggatagttatttttagattaattgtttttttttgttaataaatttattttgtaaattaatatagttttataaaggatagtattgttattttgtaaagtgatttttaaattaatatttataaaatgtgaatgttattagaggtaaatgaagagtaaattggagggtgggtttgatagtttagttgaaattggtacgataatattaatttatagtattttaatttagttattgttaattttgttttataagttattgttttagggggaaaaaaagatttgatgtgtttaaagtaattaaagtttaattgatattgaattacgtttaagttggttattttaatttgttttttagttatgatgtttttttttttttagataaagttagaaattagatagatttttggtttttaggagaataattattatttaaataaaataagaaaataatttttttttaaaattatttttttaagtatttttatttagttaatagttttaatatttagggaaatttgaatattataaaataattttgtaattttattaaaataaataaaaagtttaatttataggtatggaggattttattagatagaattttgtatggtgttaaggaataaaagataaagattttaattttaagggatttataaattagaaataaaaatatatataaagaggttggttacggtggtttatatttgtaattttagaattttgggaggttaatgtagtcggattttttgagtttaggagttcgagattagtttggttaaaatatggtgaaattttatttttattaaaaatataaaaattagtaggatatggtggagtaagtttgtaattttagttattttagaggttgaggtaggagaattatttgaattcgggaggtagagattgtagtgagtcgagatcgcgttattgtattttagtttgggtaatagagttagattttgttttaaaaataaaaaaataaaattagaaatatttggatgatgtttagtaagtagtgttttttgttttaggagttatattatgttttaggagatatttttattattatttattgtataataaaatattatattaggattttattgtaagtattagaagtatttttgtttaattttacgtataaagttattatgtagttattaaaagatagtattttgtatgttgatatatgtttagttatataaattggaaaaacgaagttgattttatttatgtttatttaaaagagaggagaaggggggtagatataatgtatttacggatatattttaaaatggatagaaaagtttaggtagataagtaattgttaatagtggtaatttttggagaatcggtagagaaataggtagttgagggaatgattattgtggtatttttttttattgtggtttttttttagtatgagtatgtgttgtttttattatttatttattttttttattaattatttaattttttttatataggtttaatgagtatttattatgtattaggtgtagttttagacgttggggatttaaaagtgaattaaattattaataagttttgatggaagatatattttttggttagatatagatagataagtaaatagagtatattcgatgttgataattaagtgttaaggagaaaattaaagtagggtaaagagagattagggttaggaatttgaaggaaaagagggaattttaaatttaaagggttagggtttatattagtgatatgttgggtaatttttagattttttggggaaacgtagagtgtttaatatgatttttggtttttattagtatgaagtttgtggtattttttttattatttagttgtgatgattaaaaatatttttatttcgagatattgttaaatattttttagggtagaaagttatatttcgtagagaagtattagattagggaagttagaaagagattacgtggttggagtatagcggttgagggatagcggtaaggtcggggtatattttgggagagaatttattatgaagggggttttttttaaaaataaattttattttagaatgtttttagatttatagaaaagttgtaaagagagttttttttattgttaatattttattttatatattatattagatataattaataaattagtattgatatattattaattatagtttatattttatttaaatttgtttattttatttaaggttttttttttattttagaattttttttaagatattattttatatttagttgttatgttttttaaggtttttttggaatgtacgttttttagattttttttgtttttaatgatttggatagtttttagaagtattagttaggtattttgtaggatgttttttaattggaatttgacgttttttttttgattagattggggttttgttttggggagaaaagttatagaggtagagtcgtttttattatatcgtagtaagcgggtaaaattaatacgatttatcgatgttgacgttgtttttgattacgtgattgaggtagtatttgttaggtttttttatagttaggttatttttatttttttttgtattgtatttttggtaaggaagttattgtatgtagtttatttttaagagatagagagtttcgttatttaaaatatttataatttttttagaaattgatttgtttatttttttttatttatttatttaatttttttttttttttagatagagtttcgtttttttatttaggttggagtgtagtggcgcgattacggtttacggaagttttgagtttttcgggttttcgttttagttttttgagtagttgggattataggtgcgtttgtagatttagattgatagaattttatatatttaggaattattagtacgtttggtttatgtttgttttttttatagagacggggttttattacgttgtttaggttggttttaaatatttaggtttaagcgatttgtttaattcggtttttcgaattgttaggattataggtgtgagttattgtatttaatttgaattttttttttttttaagattcgtttggatttatggataaaggataatttttaggattttagagtttagtatgaattaaatgagaagttttttagcggattttgaatcgaggagtgttacggttttagtaaaatggaaaaatttgtgggtagttagggtagaagttggagggcgattagagtagttagaggttgtagttataatataggcggagcgcgtgtgggttggggtataacgggggtggggggtagattgtgaatttattttaaggttgtttgatgtattggagtggggagagggagggaaaggaggagagaatagtattagagaagatgttaaagattgtttagcgtagagaataagggggttaggaatcgagagggagataggaggagaagtagttttagggagtagatcgggaggttagttttggatagggtaagatgggaatagttacgggttatttaagtaaagattgtgagtgggtagtagatatgtgggagattttagtcggtagatagaaatttgagagttgtttaaatatgaaagacggtatttaaaattatagaattgaatgagattattaaggaagagagtaggtagaagaaaaaaaaaatttaagagtagaattttaagatttgaagggtttaaacgggaggttttgataggggagatgtcggttattgagggaggaaagggaattatagtatagtggtgtgataagaaatagtgagtaaataaagatttttttatagttgaagtttaatattagaatttggagttttatataatataaatatttattaatttagttgggcgcggtggtttacgtttgtaattttagtatttcgggaggtcgaggtaggcggattacgaggttaagagatcgagattattttggttaatatggtgaaatttttgtttttattaaaaatataaaaagtagttgggtgcggtggtgggcgtttgtagttttagttatttgggaggtagaggtaggagaatcgcgtgaataagggagacggaggttgtattgagttgagatcgtattattgtattttagtttaggtgatagagtaagattttgttttaaaaataaaaaaaaaaagtatttgttgatgcgttacgttgtttttttttttatttttttattagaaggttttggtattgttttattttttaagatatatagattatggttaatacgttagattgttttggttgttttttttttatgttgttttaggtgtttagttttattatagtttttattattatttatttatttttaattggatttttaaatatgtaattattttttatattttatttagtagtttttacgggatataatatagttgggacggatttgtggattatatttttaattgaaatttttgaaaaatttgaatgtattttgtaaatttggttaatagaatgttattgtgagtagaataaattattaaatgaaaaaatatattttttggaagatattgttaatcgtgtagtaatgtaattaagaattacgaatttaggttttattataaaaattattttgattaaaataatggttgtggtttttatgtaaaataaatagtaaagttgaagcggggagagattttaatattattttatttaaaaaggattttatcgtttagatttttttgtttatggaaattaaattttaaagattatttgagttaagggttatattttgatatttagaaggtgattatattatttaaatttattgtaatttgggatttttaaaatgtatttttcgaagttaaaataaagagtgtttatttagtttagttttgaaggagaagggtttttagtttaaagtttaaatatttttagtatagatttttgaaaatttataaatacggtagaaaaataatttttgtagtaaaaattagatattaatatttttatatttttttattagggagatttttatgtaaaatgtttttattaattattgtgattgtatattttttataaaatagaatatagtttttgtgttgaaaatttaattgtatatatttaagtgtttagatgattttaagtttaagttttcgaagggttttatacgttatagagataggatattaggtgagatatagtattatataatgtattaattttgttaaacgtcgtatatttattattgagcggttataatttttataagtataagtagttattttagtttttatggaataggatattattaaattttttattttatatgttatgataaaaatataaaattattaagttgagaatttagtgtttttttttattgtgtttttttttatttttattttttattaatatagtgaaagcgttagtagaatttaatttatgattaaaatttggaatttcgagtttagtttagtgttatatttttaaagtatttttaagagatttttaaattgtaagtattttttttttttcgagatagggttttgttttattttttaggttggagagtagtggtattattatagtttattgtagtattaattttttaggtttaagtgattttttcgttttcgttttcggggtatttgggcgtattattatgtttagttaattttttgtatttttgtagagatggggttttattatgttgtttaggttggtttcgaatttttgagtttaattgatcgatttgtttggattttttaaaatgttgggattatagttgtgagttattgggtttggtcggtaaatatatttttaaagtaggattatgaagttgttaagagattatgaattgtaaacgagtttttttgtttgtttgtttgttttggagatagttttgttttgttatttagattggagtatagcggtgtaatcgtggtttattgtaatttttgttttttgggtttaagcgatttttatgttttagttttttgagtagttaggaatataggtatgtatttttatgtttagttaatttttgtattttagtagagacggttaggttaatttcgaatttttgtttgtaagttatttatttattttagttttttaaagtgttgggattataggtatgagttatcgtatttagcgtaaatggttttttaaaaatattgtatattaaaaagaatgttgaatgatttttaaaattttagatattttaaataaaatttataataggaaaaaaaaaattttttatttttttagtttaattattatagttatgtcggtatttttaaaagtttttatttttatattgaaatattaatgagtagattttgtttattttttgggtgtatattaattttttttaatttatttttatatgatttttagtatgaacggaggaagttgtgattttagaaattgagtagtagttttaggtttggtatatgttatttaattatttttgttaattttatttatatgttgttatttttgattggggttgtaataatttggtaattttagtaagatatattttaaatattgtttttatatgattaataatcggttttaatttaattttgagaatggtttttattgataatgatagtgtggaattataatttggtttttttagaaaattttattatgtatatgatttaattaatttaaaatagatttttgaagtgtttttgtttttaagaaagataaatagatgttttattttttaaatagtttttatataaaatttagttatttatatgaatttataaaatatgtttgttggtattacgaagatgacgggttttagttgttttgtgtttttgggaacgataagataggataggtaggtagcggttgtgtgtttatttttggtagggtgaggtatttttgtgttattttttttttttttttttttatatattttttattttttaattattttttttttatttatattttaggataaattttgtttaaggagaagtttaatggattgttgattttttgtgaatggagattattttatttaatgtatttttttttataaatagaagtaatttaaatgatattttggtagagtagttaataattaataatggttattttttttatttttaagttggtaagtaagattttattttatacgttgaattgggttttttgtataattagattcggttaattttttattaaatgacggattagaaaagtgaatgttttatgtatagtaagaaaacggaaatttttagggagaaaagtttatttttttttttttttttaaaatgttttttttatttgttttttttttttatattttagaagagatgttatttattttagttgtaaataaagatattttgatattataaaattttgttttttttatagttttttttatttttgatattttgtgtagaatttatatatatatataggttttttttttatttaaaaaataagtttggttagatacggtggtttatgtttgtaattttagtattttgggaggttgaggtgggtagattatgaggttaagagattgagattattttggttaatatggtgaaatttcgtttttattaaaaatataaaaattagtcgggcgtggtggtatgtatttgtagttttagttatttaggaggttgaagtaggagaatcgtttgaattcgggaggcggagtttgtagtgagtcgagattgcgttattgcgttttagtttgggcgatagagttagatttcgttttaaaaaaataaaataaaataaaataaaataaattttatttaaatttttgttttttttaaataaatatttttatttttttttttttttatattggtaaagatcgtaagaaaaggagttttatagtatcgttttggtttttttagaatttttttttcgttaaacgttgttttatagagattttgtaggtttattttggtagaatagtcgttttcgtattataagttaatgttaaattaatgatttttttttagtgtttattttttttgattttatgatatttttgatattatttatttttttttttaatatttttgattttttattcggttatagagttttttaaaataaagaggtaatttataggtatgaaaaatgaatgataatatttttttgatttttttttatatttttttatattttatattgatttatttaaaattttggtattataaatttgttttttaattttttttttatatgtatttattattatttttaaagattttatttattttgttttaaattatgaaggattagtgtattaaatttgtaattttagttttaattttttttaaatatttcgtaatattttttttaaaatattattaaatttaagttatacgattggtttttattatataagagttttgtatttatggatttaattaattttaggttgagaacgtttttaaaataaataataaaatagtaaaaatataaatagtattttattttatattagggatttgagtatttttagatttgggtataaaattttaaattttttttagagattaagggataattatatagattttttattttttcgttattgtaaaataatagtttttttagttattttttaattttattattttttaaattaattaagtttgtaaattaataaattaaataaaaaggaaggggttgggagaatattaaatgtggaatttagttttagttttgttattaattaattgtgtgaatttaaggaatttgtttaattttttcgattttatgtattcgagaaattgaaggatggattaaaatttttatagttttttggtttttaaatttttattttttaaaagttatttaaatttgatattttttttttaattttttaaaatggttttttttgtatttttgttgttattatttagttagaatgggtattttgtttatgtagagtatttttatagttttttggtatttttgttttttgtttttaattttagttaatttatttaaatttttttgtgatattattttttagtttgaaaatatttagtatttttttttagtttgttaagtatatgatttttaattttgtattaaagatttttgataatttaatttttaattaattttttaattttttaatattattttttattttaaaataaaaaggtatattttttagatttgtaataagtttagtaattaagttgttttgagttaataatattatttagtggtgaaggttttaaagtaatgtaatattttgattttttttttttcgaaagataatgtaaatattattattttttttgttttttgttttttattttttatatatagtttatttgtttttatttttttttttaacgtttttttttttttttttttttttaatttttgttttataaaaataattttttttttttaaataagattatttaagttatagttaagattttttatgttttatttagataaaaaaaagaagttaattttttttttaagataatatggtacggtgaggtttttagaatttttttgtatttattatattataagttatattatgttttttataatttgttttgtatatattattttttttgtttgaattgtttttttttgatttatattttttttagaatttatattattttaaatttatttgttttagattttttagtttaatgaggtgttgttatggattattttgatttgaatggattttttattatattggtttataagagattgtgtatttgtttttttttttattagattacgagttgtttgagggtaggaaatacgatttgtttagtattagatgttgtgtttggtttaatgtttgatatagaggaggtttattattgttggattggtaaatggatagatgaataaagcgttaagagtgagaaatgtgaggtaggattgtgttggggaggggatatagagagggataatataggaaaataaaatatttattttttttaaattaatagaaaatttaggtataattacgaggttggtaataatattgtaggtggttgttttgtagaggatttatttttaatagtttagaaagaggttattatttattttacgttgttttaaaattggttatagataatgttagattagtgtttgtgttgtagattattataaagttttaattttaatattttatgaaggatatagattaaattatgattaatattttttaagtagtgtatagaagtttttattatttttattttatagatttatttttatatatataatgaatttttggaattaagtaagaatttaggtaatgtatttaaatttggaatttatagtaaaagatgatttaaaaaatttaaaagagtgaaatatgtagattttttattagaatatatttttgaaatgaaaagttttttttaggtatgagaaaatggtaattttttgattttaattgatgtatattatttattttaaaaatttttttttagtgtttaaggataaataagtatttgtaaattgaataattaagtgagattaaaagatagagtttggttttaatttttatataatttggttaaaagaataattatttagcgtaaatttcgtttataaagattaaatagtatatttagttttacggttttttgttattaaattaggttttttaggttataaattatgttattgagatagaatttaatgtaataataatgtattaatttgatttggttgattgattttacgtaaaattagttaaatttgggtggaaagtaagcgggtaaagtgttaaaatataatttttaagattttatttatttttaatatttaaagaaacgattgttttaaagggattttaaagtaaagtttaaaggtaatggaaaggtagaggatgattaggggaatgaaaatagaattagtttgtgtataatttttaaagatttttttttttttttttttttttttttttttttttttaggttgaattgtaatggtacgatttcggtttattataattttcgtttttcgggttgaagcgatttttttgttttagttttttaagtagttgggattataggtatgtattattatatttcgttaattttgtatttttagtagagacggggtttttttatgttggttaggttggtttcggattttcgattttcggtgattcgttcgtttcgattttttatagggttgggtttataggcgtgaggtattacgttcggttataatttttaaatatttttttgttggtatttgttcggattatggatttaaatgatttattaatatgatgagaatttaacggggatattttaaaagagataaatgaatatataggtggttcgaaatgattttataaagttttttaataattatatttttttttagagtgttaaagaatttggtttatttaaggtgtttattttttaaaaaatggttatataaatgtaaattttatttaaattaaattttattttgagtttgttaaatgttatgtttagtattatttaaggtttatattaattgttgttttaaaaaattatatagtgttttaagtatttttatattttaaatataaaggaataattttaattgtggaattagagttgtttttttaagataaaaagataaagataaatattataattaattattaattggagaaatatttttttaaacgtttttgtaataattggatgtgttggatagtataattaaatttattaagaatagtgtgaaaaatattattattatttagtttttatatatagatatttttttaaattatcgaaatttgtatttgaatatacgaagtattaagaatttgtttttgaaaaggaaatgaatatttgaaggttattttttttttaatttttttttatattaataattattgttaatatttatttttaaaaaatcgtttttattaggtattcgggaattgtttaataaaagttatttaatgaaattatagtttagataaaaaaaaaatttaattgtatagaaaatatttatgagtttatttttttaatttatataattgcgtttttgtttttaaagttttgtaatttatattagcgggaataaaaaaatttaatatatagtagaaagttggttttttaaaagaaagtatttttttttaaaggtaatgaaggattaaaaatttttttttttaaaaagattttagaagttttttttttagagaagatagaaaatattgataaatcgtatattgtgtagatgtttagtttcgaaatgtagtttcgtagttttttatttcgtagtttatcggttgtatttgtattttcgggtagcgtttttgtagggcgtaaatatttagagatttagggattcggtagtttcgcgtaggtttttcgcgtgtatcgtttagcgagcgggtttttcgtagacggcgggatgttttaggagatcgcgaggtcggcgtagttcggcgagttttcggagggaaggcggcgtgttagaaaggatcggattttagtaatggtttcggatcggtttcgcgcggtcgtttttttttttcgtttcgtcgtcgggatttttttagttagtgttgaattttttaattgggaaggatcgagttattttatttttcgggaagtcgcgcgtttattcgttttcggtagcgtcggagttcgagtcggggatcgggcggatatttatagagttcgtatcgtagcgcgttgtacgttttcgttttcgttcgtcggttcgcgttttagcgaattaatcgtaaagttggttcgaagtggcgacggcgttttcgtggagtttattcgtcgttttagcgcgttttcgagtagggatcgggtttgtcggggttttcgtcgggttcgcgcgttcgtatggtatttgtcgcgcgagtcgttttcgcgtttttttttcgcgtttttttttcgcgttcggtcgtttagttcggcgtcggcgttttacgtttttcgagcgtaggagattttttcgtttcggtttcgttcgtcggcgtcggcgttcgtttttcgggcgcggaaattcgagtttatttttttcggttgtcggttttgggttcgcgggttcggttacgtagtttcgttcggatttaaagagttttagtttttgcgaatattaggttcgtgttgggagacgagaaggcgtttagcggggtttagcgcggtttcgaggggtagggcgaggtttgtgatgtcgaggttagttacggttagttataggcgttgtgtaaggaattggggaaagttttttgttaagaaagggaaacgttagtttagttaaaaaaaaaaaaaaaaaaaaaaaatgttggggtttaatgagaaagttttttagaggtatttttttagtttttttatagaaatatgggagtttttgaatttgtatttgaatggcgcggttttgggttcgcgaaggtttggtgggttgaagtcgttttttaggtttttaaaggaatgtagttaggtcggaatttatttttttttttaatttttagaaaggggagacgtttttttcgcgatttttttttgtcgagttagattttaggtttttttcgtcgcgggcgtttggtttttttcgttgatatttcggacgtttaggtttgtgggataaaaggtagtcgcggcgtttcgcgggttttttagttcgggagtcggttttaggggttttaaagcgtgattttaggtcgataattgtaagtttttaggtagaggggaagttttagcgtcgagacgttcgtttcgagaatttttcgcgtcgggcgtttagtttgagcgtttcgggcgcggagtttattttcggtgcgggtagggttttagtcgtaggttcggcgtagggcggattcggtcgaagttcggagggtcggaggcgttgggacgtagttcggataagagggcggatttgatttcggaaagtttgtgggatttaggtattttaatattgggaagataaagagattcgatttttttgggattggtgaggggagtttggcggggaggggaacggtagggtagttaagtgtgaaagagaattttttgggtttaaagttaacgtagttattttataagttattttagaggtgatcggaaaaaataataataataaaggtgtttagtaggttgtggttgggaaggaaaaataatgtttgtaagatgagtgtgtcgattcgtagttttatattttttgtttattagttggaatatatatagatttatatatttagtaaatgtaaattttattatttaaagacgtgtttgtttcggttataattgttttaagtgtttataggttaattttatatatggaatatttcgaaagtgggtgatttgatttttaagtttaatcggtttgtgtcgtttgtcgaattgtaaattttagtaaaatttaaatatatcggaattttagtcgttttttgggagcgaggaagcgggagtaatgttaaaaggggaaaagaagaatagtaaaaaaagtataaagatattattttttgacgtaaaattacgggattttttttaaatggtataagagaatttttggagaagattattattaattaataagtaataacgttttttagggtttattagatgttttatatttgtttgggaatttcgattttttaggttttttgagaaatttatttgtttggaagaagttgtatttcgtcgttataggagtcgtcgagagttagggatggagattttagatttaggattttgttacgattttattgatttttaagcgttaatagaacgaaatggatatgtttattagttattataaatcgaattattttatatgagagagagaaatgtggtttaagttttatatttgttttttaaataatcgattttttttaattttgtttttaaaggttcgtggaaattagggagggggttggggagacggttttagaaataaaacgtttttttttagtacggtttttatatttagtttatttaagttgatttttgtaatttatataaagaatgggttcgggtgggtggttagtgaagattggggtgagtaagcgtttacgtcgtcgagcgtcggggaggtttaggttcgttttcgtatagaattttgtaaggagcgcgtttcgttaggtgttcggattagagggcgttgcgtttttgtaaatttcgcggtttcgatgcgttttttttaggtattattgttataataagttatatttaaaataatgtataaatagtatcgttttttaagttttttttaatagtgttttatatgtattttatgaatttttaaagttatgtatacgaattttttatcgtcgattcgtataaagttagagggatgcgtagtttttggagtcgagaattcgtagggcgtatacgttttttcgtattcgtttagagttatatattttacgtaattttattaacgtttaaatttaaatgttaaaaggtatgtacgatttgaataaagaatttattagtttagtcgagttttcggttttgggttttaaagttttcggtagtttcgtgattttttcgcggtgtagatatgtgttaagagtcgggtttgaagtattaattttgttttttcgggatttttagtatgtttttaattagagtgttaacgttcgtgtcgtcgggatttaggcggtcgtattttcggaggttttcgattagggtaaatttaagtattaaacgtaggcgaaaagagagtgcgcggggtcggaacgagggttcgggagtagttaagtttgttaggacgtgtttaggtagttagtcgtcgagttgaggagttgcggtcggcggttgcggcgattcgttgtttttttttttatttttttttttttggaggcggtgggggaggggaggtgacgttagcgtttcgtttcgtttttagtttcgggcgcggacgggatttttcggttgggcgcgttatttcgatagtggtagtagcggtcgtggaggttgcgggggtttcggtttttgcggtttttttggtcggtcgtagttgtggcgcgggtgaaacgttcgtttttttttttcggttgcgtttttcgggcgtcggcgagcgcgggcgtttttcgtatttagcgtttggagtcgtttggagtttcgttgcgcgtattttttcggttcgcggagttttttcggcggcgttttttacgtcgcggattgtaggtgatgtttttttttttttgtagtcgaaattcgtcgcgatgtgtcgtttgttagatttttgttgggcggaagtatgaatagtttttgtagattggtttggacgatttgtattttgtggttttttaatttttggatgtgaatttttttttacgatttattattatgtttttcgtggtttttgtgttgaaaattacggagttgtatttttatttttaaatttttttttaatgttttttttgttttgatcgtattttgaagtttataaggttttgagaggagggggcgaagggataggggaggagttagtttttaatgtgttttataagttatttttagtgataggggttaatacgtaaattattgtttttttttcgaaataatatttatttagataaatgtaaatattgttgaggtttaatttataaagaatgcgtcgtttttatgtaagtgtttagtttttaggaaaatatttgttgtggaatatatttttaatgttattaaagtattaaaatattttttcgaatagcgtgaaatttcgagggagttatttttgtgagttgatattgtttttagaagattgttattaatatttaagatttttgtaaaagggggttgggggcggttttattatatttgtattcgttggtataaatatgttgattagtttagttggtcgtttttttataaaggttaagagtaaaattttgagtatagaggaaattgggtagggagttaaatagtaaggagagaataagattaggtgattggaatgttgtgtgtgtttagttttgaagttataatttgtttaaatgttagtgtttttatttgtgatatgggattaatatttgttttatgtggtaaaaatgtatttatgtgtttatttatttaaaaaaaaaatatattgtattttatttgttagggagataatagttatttatgtaggtaaagtatttttattgagtattatatgaagtgtttagtacgtatatagtaggtatttaaataatattagtttttttgttttttttcgttttttttttttattttttggtagtgttttagtttttaatttataaaattagtattattattattgattggagattttgttaggtaggtttttagatttaagttaggttttttgggtttaagagatttttttgtttaagttttttttttaaggtatattttgatttggaagggaggagaggatttagggagttaggatacggagggatataggaagggattttagagtttttgtagatttcgagggtagttagagggtgttagatttttaaggagggaggaggttggtttgagaggttagtttgttagtgtttagcggattttttttgtttttttgttttaattatataggttttttttttttgtgttaatagttgaaattagaaattgattatatattgtaagtttttaaaatgatttataataaatttatttcgagaggtttttcgttgaagtttatttggtttgttatatttattttaaagttgtaataaataaattaaattatttaaaaaagataaaaattataaatgataggaatttatgaataataattgatgatattagttaaaatagttggtttttaaagtgagatgggtagaaaatttttaatagaatttttagagttgtgttaatgtagtgggtagttatttgttttttgtggttatttttagttaaattaaattaaaaggtattttttgagttttattagttgtatttcgagttttagtga

SEQ ID NO: 63 - DNA, 8201 bp, Artificial Sequence
  chemically treated genomic DNA (Homo sapiens)
gcgggatgttgtatcggcgtagtaaggtggttagttcggtattcgaaagatttgcgtagttgtttatggcgggtgcgggtttaggcggaggtttggcggcggttcgggtttattaaaatcggtcgagtaacggttgtcgaggagtacggcgggggcggtacgagcgtatcgggagcggtcgcgttcgcgttatagtcgaatcgttgtcgcgttatagtcgaatcgttgtcgcgttacggtcgttggtttcgtaggttgcgcgcgttgcgcggggcgggatttaatcgcgggagtagtcggtatagatcggtcgtgttttgagagttgggaggttggggtcgcgagtttaaacgttattaacgcgaggattggttagcggcggagagggcggggttcgttcgggagttagggcggtgggaatcggtttcgcgatgggagcgggcggggtcgtaagtttatatgttataagtacggggattggttagtgatggagggggcggggttcgcgcgggcgcggagtaaaaggtttcgcggtgggagcgagcggggtcgcgagtttatacgttataaaacggggattggttagcgatggagggggaggggttcgcgcgggcgcggagtagaaggtttcgcggtgggagcgagcggtattgcgagttcggacgttattaatgtatggattggttagcggcgtagggggcggggttcgcgcgggagttagggtaatgtaaatcggtatcgttgtgggagtaggcggggttgcgggtttaaaagttataaacgtatagattggttagcggtagggggcggggttcgcgcgggagttagggcgatgcggttgggagtttagacgttattttgtggcgtgcggcggggtgagaggggcggggtttgcgcgcgagggattcgggacgtgcgagcgggcgaagtcggcgtttggggtggttttggtttttaagtcgtttgggtttcgttcgatttttgtatatttttatttttcgtcgtcgtttttttttttagggttttagagtttagggtttttcggtcgtatttcggtcggtcgttttagtagcggcgggaagggttcggattttaagagagcgcgggtttcgggttaggcgttgtcgagggcgttttgtgtgcgtatcgttcgggaagcggttgtagggtaaggttcgcgtttacgcgattttcgtagattttttgttatgggttcgtttttttagtttgcggggttttcgttcgcgtatatgtgtttgttgtttattatcgtttatttttttgttttttttttttttttttcgttttattcgggaggaaatggggtattgggttaggaggtcgttggtattttagaagtaagtagttttcgaaggggttcgggtatgtcgacgggtacgttagtgggcgcgggtagagggcgtcgtgcgatgcgtgtagagacgacgtgtgttcgtttaattttttatgtcgtttatttattcggggtattggggggagttgaagtggggcgtttttttttgtcggaatggtttttgagcgtagcgtggttaggtagggggtagacgtgggtggcgagttatggatttttatttttagggttttgattagatattggttgttttatggaaaagagaaaggaggtgatatttattatttatatttttttttttttttttttttttttgagatagtttcgttttgttatttaggttggagtgtagtggtgtaattttggttttttgtagtttttatttttcgggtttaagtgatttttttgttttagtttttcgagtagttgggagtatagttatatgttattatgtttggttttgtatttttagtatttagtatttgtatttttagtagaaataggattttattatgttggttaggttggtttcgaatttttgattttaagtgattagttcggttcggttttttaaagtgttgggattataggtataagttatcgcgtttggttgtgatatttatattttaaataaagttagttgagggtgtatggaattaattagtgtgttttttattgggtaggttttaaattgggagtatgaagaggtgatatgttatttgtagttttatagttgagggttggtgataagggaagaagaggggagggttttggttatgtttagaatggttggtttggttggtgagggttatagattagttatttatggaggtttgtttatggggtgggaagaggtagatatttgggggagtaatgaggagatggggttttgttttgattatacgtaaagattttaataaagaggaattattgttggtaaggttttattgtgtttttagtaatatggaaggaagtgtgggtttatgaagatagtgtttggtagtgtgtagtaggagagttttgggtagggtaggggtttgtattttattttttagagttgaggggatagatggtagtttggattttgggttgtttagaggttgttttgtggattttttagttttgataaaattagattttttagtatttttgtaagttttttgtaattttggttttttttttagaggtttttgtgtattaagtgttgttttatttttttttatgttatttttttttatacggatttaagttgtttttttatgaggttaaggaattttagatttgttttttttttaaggagtattttttattcgttttgtatttgtttcgatattttgttttttatgttttatttttttgttttataattaggttttattatagatggtattaggaagttgaattgtgatggtttttttgtatttattttgtgggtatttggagtttaagtttagttttattgtagtgtagttttattttagattattggaagttaggtaggtttttgagtagtagagtttttattttatatagggagagttaggattttgcgattaggggagatttgtttaagagttttgagtatagtaattaatttatggaatatttttttattagtatttggtttttgggggtgatgatttggatagttttagagagtttttcgttaagggtagggtgggatttgtagttattagagggtttgggaagggcgtgtgtaggaaaatttgagggttttagggggttttttttgggaagtgtaggtagaggagatatcgggatgtaattaattttaagttaagaataagaaaattgagttgttttttaaggatggaatggtttgtaagtagtatatgttgtataatttataattttaatatgattgagttacgaggaaaaaatattaatatggaaatattttttagtgtttatgataagtagatgattgtttattgagttgttaacgttatttttttatttgtatttttatttttatatttattatttttttttaagatatagtttagttttattatttaggttggagtgtagtggcgtaattttagtttattgtaattttcgttttttaggtttacgcgatttttttgttttagtttttcgagtagttgggattataggcgtttgttattacgtttagttaatttttgtatttttagtagagatcgggttttattgtgttgattaggttggttttaaatttttgatttcgtgatttatttgttttagttttttaaagtgttgggatttattacgttcggttttttttttttttttttttttttttttttttttttttttgagacggagtttttattatttaggttggagtgtagtgacgtgatttcggtttattgtaatttttgtcgttcgggtttacgcgattttttcgttttagtttttcgagtagttgggattataggcgtttgttattgcgttcggttagtttttatatttttagtagagacggggttttattattttggttaggttgtttttgaatttttgatttcgtgatttatttatttcggttttttaaagtgttgggattataggtatgaattatcgtatttggtttttttttttatgtttagtgatagggttttattgtgtgatttaggttggagtgtagtggtgaaattatagtttattgtagttttaaattttcgggtttaaacgatttttttatttgttttttgagtagttgagattatcggtgtacgttattacgtttagttaatttttatatttttggtagagatagtgttttgttgtgttgtttaggttggttttaaattttcgggtttaattaatttatttgttttagttttttatagtgttaggattataggtatgagttattatgttcggttaatgttttttttaagattagaatttttttaatattaaataaatttaattttttcgtttttttgagcgattttgtttttgttgtttattttaggttagatttggtagcgtttgatttatggtagttaggtttattttagggttcggagttttgtagtttcgtttcggggttttgtttgacgtaggcgtttagttaatatttgtaacgatttgttgtttttattttaggaaataatttcggtttgggatagatattaggggttgtgattgtgggtggttttttggagaaggtggttttgggtttcggtttttttatttggggtgcgtttggtttttttagatttagatacgtaggatttttgtgattgggtttagatacgagttttgtagtttttgtgggcgttggaggcgatttttttacgaagtttttttttttttagggtttggcggttttcgtcggcggtgagtttatttcggggggcggcgtcgtcggcggcgggtcgttggagtttacggcgtgttttcgtattttcgttttttacgtattcgtttcgggtttttgggtaattttattaattaaggttttttcgtcgggtcgggtcgggcgcggggcgggcgcggggcgggggtgcggttaataagaaggcgggcggcggcggtttattcgcgtggaggcgcgtcgcgcgtagcggacgtcgatagaattttcgaggcgtttggcgcgggcgcgggcgcgaaggcgattcgggcgttatttcgcggttatcggttatcggtcgtttttaggaatagtaggtgaggttttcgcggttcggtttcgcgtcgtagggtcgtcgcgtttttcgtcggtcgggggcggggttggagaaggcgggtagagaggtcggaaaacgtaggcgttagttcgcgtttaggttcgggttaggtttagttgggatgcgtgagtcgatggaggtttttttggtatttgggagtgagtgtttagagaatagtttttttagttgatttacgagttatgtttgtgtttacgaatgtgggagtttgaggttatggggggttttcgagagagagagggtgtttgggtatttgtttatgaacggattattgtatgtttgagagagaagggttttgatattaggaatttgtgtggatttagggcgagtggttatttggaaggatattttttagttagtgtgtttattgggagggggatagcgtgttttttgttggttcgagtttatagggtattagttgttttgggtataggggagttggttttggggttgttttattttatgggggttatggtgaggatgagattaggttaggttttttggttgggttttgggttttatgttaggttggttttgagttggatgcgtattgttagttaggatataattaataatgtttttagattttcgtgttatttggggttaggtaaaataggttaaaatttattggtagatttatttgtaagtgtttcgagtgtatcgttaaggtgggagtttgggaatgggcgattttatttgtcgtatttggatttgttagtataggtttttttttattttgttagtttgcggttttttttttttttgcgttttttggttacgtaggtttggaaatagttttttagggattttagttgaatagtttttgggtttgggttatattttttagtgggagggtttggtttggggtttgagggttaggggtggtgtggtgggcggggtgtgtttaatatttaagaatttattttaaataagggaaaatatgaaagagttggattttggttttttaggattgttcgatttggtggttttgggatcgggcgatatttggcggttgatattatgttttagggataagaattttttatacgtttattttttgttttttttaaatagggaaaagttagggttggaagatacggtatttattttttgatattttttttgttggaattgattattggttattttgatttagtttttttgagttttgaagattaaggaatgaatttagataatttagtttaatggtttttagtggagagagagttaattattgatggaatttcgtgtttgggaatttgttttttagtggggtagggggattagaaggataattttaagttcgttttgaatggggttcgtgtagggaggggtttgtatgggttttttttttttagtttttttttttatttttattttagtttttagacgtttaggcgtatttggtgtaggtgtgttttaaagtggttaggagaggggataatatataggggttggttttagtattggaaaatgttatttgtattttttaatattattattagtgggaaaaattagtggggttataggttgtttcgaagtgaatgtgttgggcggattatagttttattacgtgttatgtagatatttagggttataggagagttaattatatttgggtatgacgtgttggttaatttagggtttttattttttattggtttttagtagataaattaattattattagaattgaataggagggatagatatttgtttttttagaaaaaaaaaaaaaatatttagaggaggaaatattttggagaggggaggtatcgaggattgagagggaggggagtgtataatggggaggaagttataggtaggttggtttttgattgaagatagtagtagtgagcgtttttagtcgttttttggttttagtttatatttcggtatagtagttattgtattatttttagagttatttattagaaaattttgagtgaagagtttttatagttttggggatataattttttaggtttttgatttttgtttttaggttttttttgtatttgttattatatttgaagtttatttagatttaggtgtttagagtttgataagttttatgggaatttttgagtaggtttttttgggtttggaatgttattttcgtgtttgttttttgttttggttacgttgggttgaggggatttttcgataggagaggatttttcgttttagttttttttagtgtttcgggtgaattggtatgaagggttaggcgggtatacgtttttgtatgtatcgtacggcgttttttgttcgcgtttattggcgtgttcgtgggtatgttcggattttttcgaaggttgtttgtttttggagtgtcggcggttttttggtttagtgttttatattttttcgggtggagggaagtagagagggaggcggtgggaagtagcgggtataggtgcgcgggcgagggttttacggattgggaaggcgggttcgtggtagggggtttgcggggatcgcgtaggcgtaggttttgttttgtagtcgttttttaggtgatgagtatataaagcgttttcggtagtgtttggttcggggttgtcgttttttaggggttcgtttttagggttggttttttttcgtcgttgtcgggtcggcggacggggatgtcgtcggggaattttaggttttgggggttcggggaagggggatgacggcggggggtagggatgtgtagggacggggtagagtttaagtgatttagggaagagagttattttatttttcgtaggggttttggggaaggaaagttttttgtaaggcgcgtcggttgtaggttaagtagtttcgcgttagatattgtttagttttttttcgttttagggcgcgttttttgtagcgttaacgcgaggttgcggggttgggagtatttttgtttattttattgtttagcgatttattttggagttcgggtttcgcgtttgattagtcgaattcgggggtttagtgggggtattttaacgggcggggcggggtggggtaggcgcgttttcgaagttttattttacggttttttttcgtaggaggttcgttttttggtttcgtttttttttcgtatttaaagggttcgtttttttcgtagt

SEQ ID NO: 64 - DNA, 8201 bp, Artificial Sequence
  chemically treated genomic DNA (Homo sapiens)
gttgcggagagagcgagttttttaaatgcgggaggagggcggggttagagggcgggttttttgcggggaggggtcgtggggtggggtttcgagggcgcgtttgttttatttcgtttcgttcgttggaatgtttttattaggttttcgggttcggttgattagacgcgaaattcgggttttagggtgggtcgttgggtagtggggtgggtaaggatgtttttagtttcgtagtttcgcgttggcgttgtaggaaacgcgttttagagcgaggaaaggttgagtagtgtttggcgcgggattgtttggtttgtagtcggcgcgttttataagggattttttttttttagggtttttgcggggggtggggtggtttttttttttaagttatttgggttttgtttcgtttttgtatatttttatttttcgtcgttatttttttttttcgggtttttagggtttagggtttttcggcggtattttcgttcgtcggttcggtagcggcgggaaggggttaattttaagagcgaatttttggagagcggtagtttcggattaggtattgtcgagggcgttttgtgtgtttattatttgggaagcggttgtagggtaaggtttgcgtttacgcggttttcgtagattttttgttacgggttcgtttttttagttcgtagggttttcgttcgcgtatttgtgttcgttgttttttatcgtttttttttttgtttttttttattcgggaggatatggggtattgggttaggaggtcgtcggtattttaggagtaagtagttttcgaaggggttcgggtatgtttacgggtacgttagtgggcgcgggtagagggcgtcgtgcgatgtatgtagagacgtgtgttcgtttaattttttatgttagtttattcggggtattggggggagttgaagcggggggtttttttttgtcggaaagtttttttagtttagcgtggttagggtagggggtaaatacgggagtggtattttagatttagaggggtttgtttagaggtttttataagatttgttaggttttgagtatttgggtttgggtgggttttaggtgtggtggtaggtgtagaggaggtttgaggatagggattaggggtttggggggttgtgtttttagagttgtgggggttttttatttaaaattttttggtagataattttggagatggtgtagtggttgttgtgtcgagatgtagattgggattaggggacggttggggacgtttattgttattatttttagttagaagttagtttgtttatggttttttttttattgtgtattttttttttttttagttttcggtattttttttttttagaatgtttttttttttgagtgttttttttttttttttaggaaggtaggtatttgttttttttgtttaattttagtaataattaatttatttgttaaagattagtgagagatggaggttttgggttggttagtacgttatgtttaaatatggttgatttttttgtagttttgggtgtttatatgatacgtggtggggttgtgattcgtttagtatatttatttcggggtagtttgtggttttattggttttttttattagtagtggtgttagggggtgtaaatggtattttttagtattgaggttaatttttgtatattgtttttttttttgattattttgagatatatttgtattaagtgcgtttgggcgtttgggagttggggtggaggtgggagggagggttgggaagggggaatttatatagatttttttttgtacgggttttatttaagacgggtttgaagttgtttttttggtttttttgttttattggaaagtaagtttttaggtacggaattttattaataattgattttttttttattaagggttattgagttgggttgtttgggtttattttttaatttttagagtttagggaaattgagttagagtgattagtggttaattttagtagaaagagtgttaggaggtgggtgtcgtgttttttagttttagtttttttttatttagaggaaataaggaatgggcgtgtagagggtttttgtttttagaatatagtattaatcgttagatgtcgttcgattttaaagttattagatcgggtagttttgggaagttaaaatttagtttttttatatttttttttatttggagtagatttttggatgttaggtatatttcgtttattatattatttttggtttttagattttaggttagatttttttattgggaggtatagtttaagtttaggagttgtttagttgggatttttaaggagttgtttttaggtttgcgtagttagggggcgtaggagggaaggaagtcgtagattggtaaggtgagaagagatttgtgttggtaagtttaggtgcggtaggtgaggtcgtttatttttaagtttttattttgacggtgtattcggagtatttataaatgggtttgttagtggattttaatttattttgtttggttttaggtggtacgggaatttggggatattgttggttatattttggttggtagtgcgtatttaatttagagttaatttggtatagggtttagggtttaattaaggaatttggtttggttttatttttattatggtttttatggagtagagtagttttagaattagtttttttgtgtttaaagtagttggtgttttgtggattcgagttagtaagggatacgttgttttttttttagtgggtatattggttgagaagtgtttttttaggtggttattcgttttgagtttatataagtttttggtgttagggttttttttttttaggtatgtagtggttcgtttatgggtaagtgtttagatattttttttttttcggggattttttatggttttaggtttttatattcgtgggtatagatatggttcgtgggttaattagggaagttattttttggatatttatttttagatgttaggggagtttttatcggtttacgtattttagttgaatttggttcggatttgggcgcgagttggcgtttgcgtttttcggtttttttgttcgttttttttaatttcgttttcggtcgacgaggagcgcggcgattttacggcgcgaagtcgggtcgcggagattttatttgttgtttttgagagcgatcggtgatcgatgatcgcggggtggcgttcggatcgttttcgcgttcgcgttcgcgttaggcgtttcggggattttgtcggcgttcgttgcgcgcgacgcgtttttacgcgaatgggtcgtcgtcgttcgtttttttgttggtcgtattttcgtttcgcgttcgtttcgcgttcggttcggttcggcgagaaagttttaattggtaaaattgtttaggagttcgggacgggtgcgtggggggcgggggtgcgggggtacgtcgtgagttttagcgattcgtcgtcggcgacgtcgtttttcgagatgagtttatcgtcggcgagggtcgttaggttttgggggagggagggtttcgtgggggagtcgtttttagcgtttatagggattgtagggttcgtgtttaggtttaattataaggattttgcgtgtttgagtttgggggagttaagcgtattttaggtggaaaggtcgaggtttaaggttattttttttaaggagttatttatagttatagtttttggtgtttgttttaagtcgggattgttttttggggtgggggtaataggtcgttgtaggtgttggttgggcgtttacgttaggtagggtttcgggacgggattgtagggtttcgagttttgggatgaatttgattgttatggattaggcgttgttaggtttggtttggggtgggtagtagaaataggatcgtttagggggacgagaaagttaagtttgtttagtattaagaagattttgattttaaagaaaatattggtcgggtatggtggtttatgtttataattttagtattgtgggaagttgaggtaggtggattaattgagttcgggagtttgagattaatttgggtaatatagtaagatattatttttattaaaaatataaaaattagttgggcgtggtgacgtgtatcggtagttttagttgtttaggagatagatgggaggatcgtttaagttcgggagtttgaggttgtagtgagttataattttattattatattttagtttgggttatatagtgaaattttgttattaaatataaaaaaaaaggttaggtgcggtggtttatgtttgtaattttagtattttgggaggtcgaagtgggtggattacgaggttaggagtttaagaatagtttggttaagatggtgaaatttcgtttttattaaaaatataaaaattagtcgggcgtagtggtaggcgtttgtaattttagttattcgggaggttgaggcgggaaaatcgcgtgaattcgggcggtagaggttgtagtgagtcgagattacgttattgtattttaatttgggtgatagagatttcgttttaaaaaaaaaaaaaaaaaaaaaaaaaaaaaaaaaaaaaaggtcgggcgtggtggattttagtattttgggaggttgaggtaggtggattacgaggttaggagtttgagattagtttggttaatatagtgaaattcggtttttattaaaaatataaaaattagttgggcgtggtggtaggcgtttgtaattttagttattcgggaggttgagataggagaatcgcgtgaatttgggaggcggaggttgtagtgagttgagattgcgttattgtattttagtttgggtgatagagttagattgtgttttggaaaaaaataataaatataaaaataaaaatataaataaaaaaataacgttaatagtttagtgaataattatttatttgttatagatattgaggaatgtttttatgttgatatttttttttcgtaatttaattatgttgggattgtaagttatatagtatatattgtttgtaagttattttatttttaaggagtaatttagtttttttatttttgatttagaattggttgtatttcgatgttttttttgtttgtattttttaggaagaattttttgaggtttttagatttttttgtatacgttttttttagattttttgatgattgtaaattttattttatttttgacgggaaattttttgaggttgtttaggttattatttttagggattaggtattggtgggggaatgttttatgaattaattgttgtatttagggtttttggataagttttttttgatcgtagggttttgattttttttgtataagatggaggttttgttgtttaggagtttgtttggtttttagtggtttggagtggagttgtattgtaatggggttggatttaggttttaggtatttatagggtgggtgtagggggattattatagtttagttttttggtgttatttgtggtgggatttgattgtggggtaaaggggtgggatataaaaggtagagtgtcgaggtaggtatagaacgggtggggggtgttttttagggagaaggtaaatttagaattttttgattttataaggaaatagtttggattcgtatggggaggggtggtatgggggaggatggagtagtatttagtatatagaggtttttgggagaggggttaggattgtagaaggtttgtagaggtgttggggaatttgattttgttaaaattaaaaaatttataaggtagtttttgagtagtttagagtttaaattgttatttgtttttttagttttgaaagatgaggtgtaaatttttgttttatttaaggtttttttgttgtatattgttaggtattgtttttatggatttatatttttttttatattgttggggatatagtggggttttgttaatagtgatttttttttgttaggatttttgcgtgtagttaaaatagggttttatttttttattatttttttaggtgtttatttttttttattttatgggtaaatttttatggatgattggtttgtgatttttattagttaggttagttattttggatatgattagagttttttttttttttttttttgttattagtttttaattgtgaaattatagatggtatgttatttttttatgtttttagtttggggtttatttagtgaggggtatattagttgattttatatatttttagttggttttgtttagaatgtgaatgttatagttaggcgcggtggtttatgtttgtaattttagtattttgggaggtcgagtcggattgattatttgaggttaggagttcgagattagtttggttaatatggtgaaattttgtttttattaaaaatataaatattaaatattaaaaatataaagttaggtatggtggtatgtgattgtatttttagttattcgggaggttgagataggagaattatttgaattcgggaggtggaggttatagagagttaagattgtattattgtattttagtttgggtgatagagcgagattgttttaaaaaaaaaaaaaaaaaaaaaagaatatgaatgatgaatgttatttttttttttttttttatgagatagttaatatttgattaaggttttgggaatgggaatttatagttcgttatttacgtttgttttttgtttagttacgttgcgtttagggattatttcgataggagaggacgttttattttagttttttttagtgtttcgggtgaatgaacggtatgaagggttaggcgggtatacgtcgtttttgtacgtatcgtacggcgttttttgttcgcgtttattggcgtgttcgtcggtatgttcgggttttttcgaagattgtttgtttttggagtgttagcggttttttggtttagtgttttattttttttcgggtggagcgagggaggaggaagggaagtagaggggtaggcggtggtaagtagtaggtatatgtgcgcgggcgagagtttcgtagattgggaaggcgggtttatggtagggggtttgcggggatcgcgtaggcgcgggttttgttttgtagtcgtttttcgggcgatgcgtatataaagcgttttcggtagcgtttggttcggggttcgcgtttttttagggttcgggtttttttcgtcgttgttggggcggtcgatcgggatgcggtcggggaattttaggttttggggttttgggaagggggacgacggcggggagtagggatgtgtagggatcgggcgaagtttaagcgatttagggattagagttattttaagcgtcgatttcgttcgttcgtacgtttcgggtttttcgcgcgtaggtttcgttttttttatttcgtcgtacgttatagggtgacgtttgggtttttagtcgtatcgttttgattttcgcgcgggtttcgttttttgtcgttagttaatttgtgcgtttgtgatttttgggttcgtagtttcgtttgtttttatagcgatatcggtttgtattgttttgattttcgcgcgggtttcgttttttacgtcgttagttaatttatgtattagtggcgttcgggttcgtagtatcgttcgtttttatcgcgagattttttgtttcgcgttcgcgcgggtttttttttttttatcgttagttaattttcgttttgtgacgtatgggttcgcggtttcgttcgtttttatcgcgagattttttgtttcgcgttcgcgcgggtttcgttttttttattattagttaattttcgtgtttgtgatatatgggtttgcggtttcgttcgtttttatcgcgagatcggtttttatcgttttgattttcgggcgggtttcgtttttttcgtcgttagttaattttcgcgttgatgacgtttgggttcgcggttttagttttttagtttttagggtacggtcggtttgtgtcggttgttttcgcggttaggtttcgtttcgcgtagcgcgcgtagtttgcggagttagcggtcgtgacgcgataacgattcggttgtgacgcgataacgattcggttgtgacgcgagcgcggtcgttttcgatgcgttcgtgtcgttttcgtcgtgtttttcggtagtcgttgttcggtcggttttggtaggttcgggtcgtcgttaggttttcgtttgagttcgtattcgttatggataattacgtagatttttcggatatcgagttgattattttgttgcgtcggtataatatttcgt

SEQ ID NO: 65 - DNA, 6177 bp, Artificial Sequence
  chemically treated genomic DNA (Homo sapiens)
gttttggttgtttggttaagggtggtttggaggttagagtaattagagaatattattggttatttttgtagagaattaacgtttagtaaggattgagtttttagttttggttttttttttttaggttgtgggttaggattatggaggaggggatattttagttttgtatagtttgtttttggtttggagttgttttgagtagtgtagtttattgattttatttagtatgtattgggtgattattatttattattaagagttagggtatattaagttattataaggtggtttttacgtttttttgacgtttttagggtacgtttttttattttcgttttttttatttatgaggatttattgtaaattttttttaattatgtatatgagattaggattttatatagtttttaaatttatatttattgtgtaaggttatagttattttgtagtttaagataaataggatatttttttgtatttatttattttggtttaagtttttatatggattgaatgtttgtgtttttttaaaatttatatgttgaagttttattttttagtgtgatggtattaggaggtggggtttttagggattattaagttatgggatggagtttttttgaatgggattagtgtttttataagaagagataagaacgagatgattttttttttttttttttatgtgaggatataaagagaaaatggtttttattaagaatttgattatgttggtatttggatttcggatttttgtgttttttagttgtgagaaatgaatgtttgttgtttaaattatttagttttatagtagtttaaattgataaattttttttcgggatgattgtttttattttttcgttttttgtttttgattttgggaagtggattttgaggaagggttaagtgggtatattggggagtgatttttataagtgtaaaaggggaggaagtaggattgagtaataagatgtgttttagggagtttagaagtagagattgtttatgcgggtagttttgtatcggatagtaatggcgaggttttgattattttttggtttagttatggtttgaggttattttaagaagaatatggttatttagatagtagaagtatatttggaagtgttgataggtgaaggtagttagttggttagtttttatatcgttatatagtaagttttatattgaagggggatgtttgtttgttatttatttttgtagtttatttttagtatagtagttggggtgattttgttaaaatttaagttaggttatgttatttttttgttttaaatttttaaagatattttatataggtttttaagggttcgtaagatttgttttattcgtatttcgtttgttgtttttttaaatttatttcgttttttttatttgttgtaattatattgattttttgttgttttttaagttaggaaatattaggtatattttttttttagggtttttgtattttaggttttttttgtttgaaatgttgtgtttttagatagttacggggttttttttttgtttttagggtttgtattaaatgttagttgtttagtgaggcgttttttttttttttattagaaattgaggtcggttatagtgatttacgtttataattttagtattttgggaggtcgaggcgggtggattatgaggttaagagatcgagattattttggttaatatagtgaaatttcgtttttattaaaaatataaaaattagttgggcgtggtggtatgcgtttgtagttttagttatttgagaggttgaggtaggagaatcgtttgaatttgggaggtggaggttgtagtgagttaagatcgtattattgtattttagtttgggtaatagagtaagattttattttaaaaaaaaaaaaaaataaaagaaattgaaatttgttatttttgtatttttatttttttttattttattttttttagagtatttattatcgtttaatatgttttatattttgttagaatgtaaaattttcgaggatagggatttttttgttgttgttttttggttatttttattgtttaggatggtattatagtatataggaggtgtttagtaattattgtttttaatagtaaaaattataattatttttgtattaaattaaatatttgttaaattaataaatttatatatagatttggtgttttgttaggtggtggagatataaagatttagttgtttgtttttaaagggtttatagtttaatggaggaggggaataaagataagtagattatgtattaaggaatggggaaaggggagtggtttattagagatagagttttagttttgtaagatggtaaagttttggagatttgttgtaaaataacgtgaatatatttaatattattgaattgtatatttaaaatttttaagatgatatattttatggtagttgttttttaatataattaaaaatttttaaataataaaaataaagtattatgggtagtagttgagttgttgaaagtataaaggtatatttagtatagagggagttagtaaggggatttttgggagaaggtaataattgagaaaagttttgatttatagcgtttagtacgtgagggtgttttatgtagagggaatagtagggataaaggtaagagcgtatagagaattttattagtgagatttggttgggttatagcgagaagggtgaggggtaaggttggagaagtggttagggattggaggttggggagtttagggtttatttagaaggtgatagggagttatagatgattttttagtagggcgatgttggttagatttttagggaagtgtggaggttgagttggaagggtggggttagaggttaagagattagttgggaggttattgaggtggtagtagtttgaataggattagggtaaagggaatgtagggaagtatgtggttttagggatatttttaggtggaatgattaggttgtggtaattgttgttttagttgattttagtttttttattttttggggaggaggtcgagttatttaaatttttaaagtttttgaggaaggagttagagtagggtgagggtagttttgacgttattttttagttttttattggttttttttttttttttagtatattgaattagaaaggttttgggagagttgggtttagttttaagagaggaaaattcggtagtgagtagaggttgtagtgggggcgtggtgagaattagtttttaggggtttcggtttttatgtttttaagggttagaattaagtggggtagttgttagttttagaaatttaggagatttagtttagtttggttttgagggagaggtttagaggggaagttagtttagtcggattttttagggtagttagttttgaagtttttaggtttgcgtgtttttaaagatgtttttttgttggttttgaagatagaatttttagggattcggttttggggtttagggaatttaaggattaaattttgttgtggaggaatagggatttttgtgttattagttttaggttttaatagttttttgttattttttttttttttagttgcgttagtttttattattttttaagaataatttatagattttttttgttatagtattataatgtttttagttattatttatttgaaaaattttatgtattattattatattatgtgttttgattatattgtatgttattaattttataaagtagatattattattatttttattttgtagaggaagaaattgaggtatagggatttgagtaatttgtttaagggtataggagttaatagtaaagttttagtttttgggtttagttattaataacgttttagtatttcgagggtagtggttatagttttagaattttatagttttaggttttcgagttatatttatgtcgtttttttatttagaatgttttttttttttatttggttaatggagggggaaaagtatttttttttttttaggaaatgtttttaattaagttttttgggaattatttagtattttttaggagaattttttatatttattattttatcgttatttaagggttgatatgtttaatttttgtattagttagtgagggaggaggttagagattaagtttggttggttttttagggtatttttaggtttttaagtagcgtttgtagtatagtagatgtttattgatgtttatttatttgtgatgtttgaatgtatgaaggtaggtttcgtatagtttttttatttttatggatgttttttatattatttagttattatttagaggtataagaacggggtttaagttaaaggttaggtggtttttttatttttagttttaaggagtttatgggaattgtttaatggtttttgattgtgtagtttgtttagatatggggatgtttgagaattttggaagaacgtgggttgggcgtggatagagacgtttgttttattatgtatgttggaggtgtggattataatttttgttttttattggagtttttcgcgtcgtaattagttttgatcgttttattttggtatattagggttagttatttagtaaatgagtggtttttatattttatttttattcgtttattttttatagtttcgtaggttagttgtttagatttatagtttttattgtaatttttttaaatttagttattttgagagattttggtttgggagaattttttttttttggttaaagaaacgataggagagtttattgtttggaatatttggtggagagagaatagaggagaggaagggtaggttagttttttttgtttttttttatcgtaaattatataggtttattttttcggagtgggtttagggagtttgtattttttagttttcgttttcgttttttttttagcgttcgtcgtttttttcgtcgcgttttttgtttttatttcgtttttttgcgttatttaaggcgttttcgtcgttcgtgcggtttagtagggttttcgcgggcgttatttcggttatcgtttttatttttatttgggtcgttcggtaggtaggcggtgagtcgggggttaggaagggattaggggcgttatttgttcgcgggaggtcgggaggagttttgggtttttcgatgtcgggacgggggttgttgcggaacgttcgtcgcgatagagtcgcgtttatttaggtggttttggttaggtttttattttttttttatggaatttttgtaataattcgaggcgggaggaatattattgtttttattttatcgtggaggagattgaggggtttagaggttgttttttatttaaggggtcgtagttattaaaaggtaagatttgaatttagggtcgtttttagagtttggttttaaatagttttgtatttgggaagaggtattttttttttgggaattttgtggtttgtgttttattttgtaatgataattttttttaagagtttagaatttgttagtattagttttggaggtggaagggggtgggagtggaggtggaggaagaagataggattaaatgtttttttttaagtggtaggtggttattattgttgatcggtggagttaaaggatgatgttgtttttagtttttaaaattttttttattatttagtttttgtaggtttaaagattagagtgaagttagttgggtaagatatgaggcggggagtagggatttgaggttttgagttttttaagaagtagaagataatatttttattattattattagtttttattgtttgggggtagttagttttgggtaaaagggaggaagggtttagtttagttgtataattttggataagttttttaaattttgtttttataggtaaaggagttttaattttatttagatttttttggtttgtgtttattttggggtagtggttcggggataagagggatatagatgtttgattaggtagggattttagttaaagtagaatgagattatataaagaggtgggtagttattatttaaaaatttgggttgggttttgtttgtattgttgagtgggagtttttaggttagttttttttttttttgagtttgggtttttttgtaggtagaacgggcgtggtagatttttttgtaggtttgttgttgggcgaacgagaaggatgttatgttgatatattgacgtgttttgtttttttgtaga

SEQ ID NO: 66 - DNA, 6177 bp, Artificial Sequence
  chemically treated genomic DNA (Homo sapiens)
tttgtaaggagatagagtacgttagtgtgttagtatggtatttttttcgttcgtttagtaataagtttgtagggaggtttgttacgttcgttttatttataaagaaatttaggtttaggaaggggaaggattggtttggaggtttttatttagtagtgtaggtaggatttaatttagatttttggatgatggttgtttatttttttgtatggttttattttgttttggttaaggtttttgtttaattagatatttatgttttttttgttttcgagttattgttttaggatggatataggttaaggaaatttgggtggagttgaggtttttttgtttatgggaatagaatttgaggaatttatttaaagttgtgtagttgggttaagtttttttttttttttgtttaaggttggttatttttagatagtgggagttagtgatgatggtagaggtgttattttttgttttttagggggtttaaagttttaggtttttgtttttcgttttatattttatttagttggttttattttaatttttgagtttgtaggggttgggtagtggaaggggttttaggagttgaaggtagtattattttttagttttatcggttagtaataatgattatttgttatttgaggagggatatttggttttgttttttttttttatttttatttttatttttttttatttttaaagttgatgttggtaaattttagatttttgaaaggaattgttattgtagggtgaggtataggttataaagtttttaagggggaggtgtttttttttaagtgtaaagttgtttagagttaggttttggaagcggttttgggtttaaattttgttttttagtaattgcggttttttggataaggaataatttttgggttttttagttttttttacgatagagtggaaataatagtatttttttcgtttcgggttgttataaggattttatggaaagagggtgggagtttggttaaggttatttgggtgagcgcggttttgtcgcggcgggcgtttcgtagtaattttcgtttcggtatcggaggatttaagatttttttcggtttttcgcgagtaggtggcgtttttggtttttttttagttttcgatttatcgtttgtttgtcgggcggtttaggtggaggtggggacgatggtcggagtgacgttcgcgggagttttgttggatcgtacgagcggcgggggcgttttaaatagcgtagaggggcggggtgggggtaggaaacgcgacggggagggcggcgggcgttggagagagggcgggggcggggattgggaggtgtagattttttaaatttatttcggggaggtgggtttgtgtgatttgcggtggggaggggtaagaggggttgatttatttttttttttttttgttttttttttattaggtattttagatagtaaatttttttgtcgtttttttggttagggaaggagagtttttttaggttaggattttttagggtggttggatttgaaggggttgtagtaagggttgtggatttgggtaattggtttgcggggttgtgaggggtgggcggatggggatggagtgtggggattatttatttgttaggtggttggttttagtgtgttaggatgaggcgattaaggttaattacggcgcgggaagttttaatgggggataggggttgtaatttatatttttagtatatatggtggagtaggcgtttttatttacgtttagtttacgtttttttagaatttttaaatatttttatgtttgggtaggttatataattagaggttattaagtaatttttatggattttttgagattgggggtgggggaattatttgatttttagtttggatttcgtttttatgtttttaaatggtggttgggtggtgtgggggatatttataggaatgaaagggttatgcggagtttgtttttatgtatttaggtattataggtggatgagtattagtgagtatttgttgtgttgtagacgttgtttggggatttggggatattttgaggaattagttaaatttggtttttggtttttttttttattggttggtgtagggattgagtatattagtttttggataacggtaagataataaatgtggaaagtttttttgagaggtattgggtgatttttaggggatttggttaggaatattttttggaggagaggaaatgtttttttttttttattagttaagtggaagggaagagtattttaggtagaggggcggtatgagtgtggttcgagggtttggagttgtggggttttgagattgtggttattgttttcggagtgttgagacgttgttggtggttgagtttaggagttgagattttgttgttgatttttgtatttttaggtaagttatttaaatttttgtgttttaatttttttttttatagaatgagaatagtgatagtatttattttgtggggttgatggtatatagtgtgattaaagtatatagtgtaatagtggtatataaagttttttaagtgagtggtggttaaaaatattgtgatattgtaataaaaagggtttgtgggttgtttttagagggtggtaggggttggcgtagttgaggaaagggaaggtggtagggggttgttgaggtttggggttggtggtatagaagtttttgtttttttatagtaagatttagtttttggattttttgggttttagggtcgggtttttgagggttttgtttttaggattagtaggaggatatttttggggatacgtagatttgagaattttagggttagttgttttgagggattcggttgggttggttttttttttaggttttttttttagggttaggttgaattgagttttttggatttttgaagttaataattgttttatttaattttgatttttgagggtatgagaatcgaggtttttggaggttggtttttattacgtttttattgtagtttttgtttattatcgagttttttttttttggggttgggtttagtttttttaaagtttttttgatttagtatattgggaaagagggaagagttagtggagggttggggagtgacgttaaggttgtttttattttgttttgattttttttttaagggttttggaggtttgaataattcggttttttttttagaggatgaagaagttgggattaattaagataatagttattataatttggttattttatttggaaatgtttttggaattatatgtttttttgtattttttttgttttggttttgtttaggttgttgttattttagtggttttttagttggttttttgatttttagttttatttttttaatttagtttttatatttttttagaaatttgattaatatcgttttgttgaaaagttatttatggttttttattattttttgggtaagttttaggttttttaatttttagtttttggttatttttttagttttattttttatttttttcgttgtgatttaattaggttttattgatggggttttttgtgcgtttttgtttttgtttttgttgttttttttgtatggagtatttttacgtgttgaacgttgtgaattaggattttttttagttgttgtttttttttagaagtttttttgttggttttttttgtgttaggtgtatttttgtgtttttagtagtttagttattatttatggtgttttgtttttgttatttaaaaatttttaattatgttaaaaagtagttattataaaatgtattattttaaggattttaagtgtatagtttagtagtgttgagtatatttacgttgttttgtaatagatttttagaattttgttattttgtaaaattgaaattttgtttttagtaaattatttttttttttttattttttggtgtatggtttatttatttttattttttttttttattagattgtgagttttttgagggtaggtagttgggtttttatatttttattatttagtagggtattagatttgtatataaatttgttaatttaataagtatttagtttggtgtaaaagtaattgtggtttttgttattaaaagtaatagttattaagtattttttatgtgttgtgatgttattttagatagtggagataattagggaataataataaaaaaatttttgttttcggaggttttatattttagtaaaatgtagaatatgttagacggtgatgaatgttttgggggaaatgaagtagggaggagtgagagtgtaggggtggtaagttttagttttttttgtttttttttttttttgagatggagttttgttttgttgtttaggttggagtgtagtggtgcgattttaatttattgtaatttttattttttaggtttaagcgatttttttgttttagttttttaagtagttgggattataggcgtatgttattacgtttagttaatttttgtatttttagtagagacggggttttattgtgttggttaggatggtttcgattttttgattttatgatttattcgtttcggttttttaaagtgttgggattataagcgtgagttattgtggtcggttttaatttttagtaggagaggagagaacgttttattaagtagttgatatttgatgtaagttttgaaggtagggaggaagtttcgtggttatttgggggtatagtattttagatagagggaatttaggatgtaaaggttttggggaaggagtgtgtttggtgttttttggtttgggggatagtaggagattagtgtggttgtagtaggtgaggaaagcgaagtgagtttagaaaggtaataggcgagatgcggatggggtagattttgcgggtttttgaaggtttgtgtaagatgtttttggaggtttgggatagaggagtgatatggtttgatttaggttttgataggattattttagttgttgtgttgggaatagattataggggtgggtgatagatagatatttttttttaatgtaggatttgttgtgtagcggtgtggagattggttagttgattgtttttatttattagtatttttaggtgtgtttttgttgtttaagtggttatgttttttttggggtggttttaggttatgattgaattagggggtggttaaggtttcgttattgttgttcggtgtagagttgttcgtatggatagtttttgtttttgagttttttgggatatattttgttgtttaattttgttttttttttttttatatttataggagttattttttaatgtatttatttagtttttttttagagtttattttttagagttaggggtaggaagcgagaagatggaagtagttatttcggggagagatttgttagtttgggttgttgtaagattgagtagtttaaataataaatatttattttttatagttggggagtatagaagttcgagatttaggtgttagtatggttaagtttttggtgagggttattttttttttgtatttttatatggaggagagagagagagattatttcgtttttatttttttttataagggtattaattttatttaggagggttttattttatgatttaatgatttttgaaggttttattttttaatattattatattggggggtagagttttagtatatgaattttgggaagatataaatatttagtttatatggggatttggattagggtgaatgaatataaaggaatgttttgtttattttgggttgtagggtggttgtgattttatatagtagatgtggatttgaagattatatgaaattttaattttatatgtatgattggagggagtttgtagtgaatttttatgggtggggaaggcggaggtagaggaacgtattttgagaacgttaaggggacgtgagggttattttgtggtgatttaatgtgttttggtttttggtggtgaatagtagttatttaatatatattggatgagattagtgaattgtattgtttagaatagttttaggttaaaggtaggttgtgtagggttggaatgtttttttttttatggttttggtttatagtttggagaaaaggggttaggattagaagtttagtttttgttgagcgttaattttttgtaggaatagttagtgatgttttttggttattttgatttttaagttatttttggttaggtagttagaat

SEQ ID NO: 67 - DNA, 8197 bp, Artificial Sequence
  chemically treated genomic DNA (Homo sapiens)
cgggaggttgaggtaggagattggcgggaattcgggaggcggagtttgtagttagtagagatcgtattattttattttagaaaaaaaaaaaaaaaaagaattgttttaattgttattttgagaagattatggtaagagtaaaagtgagaagattaattagaacgttattagagtaattaggtaagatattagaggtggtttagattagaatggtggtagagttggtggtgaaaagtggttaaattttaaatatatttcgaaggtagtattagtaagattttttaatatattggatagggtatgagaaagatgtaagaattaaagatgagttttaattttttttgatttgaattattagtttttattaattgagatgaaaaggttataggtaaaaataaatatggaaggatgttagggtgtttaatttggatatgttgagtttaatatatattagatagttaggtggagatgttgaataggtaatcgggtatgtaggttttaaatttagaaaaaaagtttaggttagagatatatatttggaaattattattataaagacgtatattattaagtgttgtaatttagtaattttttttttagatatttattttaaagatattttagaatatttgagtagttttatagagatgaaagtatagttttttttaaaatagagaaaaatgaagaaatttaaattatattaaaggtaaatagttaaataatgatgatatatttaaattatagaattttttgaagtagttaaaaagaatgagttttatatttatgtattagtagggaaagagatttatagtatattattaaataaaaaagtaataagaagaataatatatatagtgtgattttttatttatgttaaaaaataaaataaaataagtaatagttaatatatgagatgaaaatgagatagatgtatggaatggggagaatggtggtgaaggggttttttattttttatattaggtaagtttatattgatttaattatagtaagagtttatttatgtattattgatgtatataaaagtaagtttaaatttataaattatagtaatataaataaattttttttaagaaaatttttcgaaaaattaaatttatataagaaaggttatttttttaataatttattttaaaaatttttttagaaaatgtttgtaattttttataatgatatttgagttttaattttaaatatttatttgatgatttttatatatttaattatatatatttatatattttatttgatttatttttttttggaatttttttaatgtaagttttttttgtatttggttttgtatttaaggattcgttgtatatttagattttagtagagaagtttaataatttgttgtatttttttttgtttttgtaagaataatacgaattatttttttgttttttaaaaaaaaaatatatatatatatacgtataaataaattagagttttttattaagttgtttttttttttttttgagatagtattatttttatttaggttggagtgtagcggtttgatttcggtttattgaaattttcgtttttcgggtttaagtgatttttttgttttagtttttcgattagttgggaatataggtatgcgttattatgttcggttaatttttgtatttttagtataaacggggttttgttatgttggttagggtggttttaagaagttttttattaaattttatatttttaaaaataattaattaattttttttttttttattaggtaattttgatatataacggtttttaatatatttttattgttttattttttaaagttgtaaagataaaaaagatttaatataaaagaggaaaagatattaagataaaattattttaatttgatgaattatagtaattatttttatttaaagtttatgtttttttattagttattgtagaattaaagagtttgttttgaaaaataaatatataaggtgttaaaaatatagaatttaatttttataaagtttttatgattaagatttatttatttttttatttaatttatattttatattattattttattatgatatttataggtgtataattttaaatttttttttagtaggtaaaatggaaattagtttatattgtaagggatatttattatggtaaagaatatagagttttttaaagaaagattagggttttttaatttttagaagatatagtaatattgattattggttaaatgtgaaattaatatttgaaatgttttaattttattaatttaaattaattataagaagggattttttgttaaaattaaaaaatgttgttttttttttttttttttttttttttttgagatagagtttcgttttgtcgtttaggttgtagtggtacgatttggtttattgtaatttttatttttagggtttaagcgatttttttgttttaattttttaagtagttaggattataggcgttcgttattacgttcggttaatttttgtatttttagtagagatggggttttttcgtgttagttaggttggtttcgaatttttgattttgtgattcgttcgtttaggttttttaaagtgttaggattataggtatgagttatcgtattcggtaaaatgttgtttttaaagtaaatttttaaaaacgttttaatttttttgttgggtaatcggtattaaaaaaattttacgtattttagatttgatagattagttgtgattaattgtttataaatttatgttttttaaaaaaataaataaaatataaatttaaaagagattgtattaggtttagtagtttaggtttgtaattttaggattttggaggttaacgtggattgtttgattttatgggtttgaggttgttgtgagttataattttatttttgtattttagtatgggagatagggattttgttttaataaatatatatttttttttaaagagagaatgtttaaatttaaatttattttaatttgttgttaaatttaagttatagaaagtgaaattaaatgttattaggaaaagtttatattttaaaatatgttaaaattagtgagaaaaaaattttattggtttatacgtatattagaaattttaaatttagtagttattgttaaatttcgaaagttattggatttattaatttaaatcgtaatttaaaattattggtgaggaaattatgaattgtataatttagaaaagtaattgagatttaagttgatataatgttttttatacgaattttgaggtatttaaagtatttttatatattgtaatatatataatagttaatagttaatatatagtatgaatttattatatattagtgaatattttaagttttttatataagtgaatattatgttaagtttaaaataattttatgagaagggtattataattattttattttgtggataaggaagatatagagatattgaataatttttcgtttaagtttataaaattaggaaataagtagtttttttttattatattatattgttattaaatattttgggtatttaatttgagaattaaatttaattttaatttgttagtttaattatatatttaataaagaaaaagcgggtttagatttaaagagtattggtgaaaagaaataaaaggagtattatttattttatgtatatatttttttattatttgtttgattattttataaatatgtaggatttttaagtttttagatgagaaaattaattatttgatattatttttaaattttttgttcgttattttatttttattttttttgttgtttttttttatatttatttatttatgaattacgttttcgtataggagtttaatttttttattgtaggtacgttatttgttgtttttttgtttgtttttagtgtacggaagaaatatttgtttttttagtaatttagttaatttgtttttagttgaagttcgttagagaagtagaagtagtagttttagtttgaaaattaaatacgaaaataggttttttaaatttttataatttagtatttgttttgaagaggcgggggttttgattagatttaaatttggttagtgttattttttttttttttttgttagttataggagtcgtcgggatatttaatagtcgtttagggaaacggggttgggggcgtttgggaagaggaaattgaatataagtttcgagttgtcgttattttgaggatttcgcggtcgtttatcgatagcgttatatgtcggttttggaggtcgtattggatattttgggcgcgcgtgtttggcggtatttgaattttaatgaatattttttttaaggtttggtattattggttttacggggtttcgtacggtattattttatttcgttttttaaacggggtcgatataatttagtttttttcggtcgcggtcgtattaggcggagtcgagcgtacgcgcggaattttacgtttaggttacgtttcggttttttcgttcgggttattgcgtatgcgtaggaacgtaagttagcgttttggtgtgcgtgttcgtttttttttttgaatggtcgtttacggtatcggtaggtttcggatgaaagaattgaaatttagaaaagtttatatgtaacgaataatgggatagaattggaattagtgaagtcggaatttattatatcgttttttaagtgacgttaaaatgtattttttaacgttttcggagggaagtgcgtttgcgtaaatgttaggttatatttgagtaatttcgggaatgattgggtgggtggggcggggaatagtaacggttttttattggatggtagtttaaattcgtaggttagttaattggacgtaattagaatttagtatttttttttcgtgtttttgtgcgggattggtgtgtttaggggtttggttttttaattggttaacgtcggggtgggtggggaatgtggggagatttgaatttgaaatcggtagggagtgataattcgtatttagttgtcgaggagtgttagttatttttagtttttggagttggtcgttaatatgtttttttttaaggcgtttttgaaacgatttaatgatttttttggtgcgtaagggggaaagagttgggggacgggagacgttttaacgttttttgttttttttagttttttttttgggaggtaagtaggaggcgattttagggtcgggttggggtttatttagttgattgattttttttaaatatgttttaagtatttgttatatgttaagtattaattaggatgttaaggatatcgtagtgaaatagttttcgtttcgtggggtttatatttaggcggggaatattgttaataaatagcggtaatggagaaattatagtagggcgaagggaatggattcgagacgttggtagttatttgatttttaagttcgagagggttttattgataagaatattggagtattatttgtagtttgaatttgtgtattttttttgtgtattttatttgggtataaaagaaggaagattagtaaaggtagtttatgggtgtaaaattagagtagtagtatttattgaaaatataaataatgaagttatggttgatattgattatttatattttaagtatcgtattaaggttttatatcgattattagttatgttaattttttattaattttaaggggtaattttattattattttattgataaaaagattgagatttaaatttgtttagtgttatattattaaagtgatcggattggaatatgaatttagtttttatcgtgtgtttttaatatcgtaatgtatagtatagtaattaggaagttttagttgtgtttggtaggtatttattatttaagatgttgtatgcggtcgggcgcggcggtttacgtttgtaattttagtattttgggaggtcgaggtaggtggattacgaggttaggagatcgagattatcgtgaaatttcgtttgtattaaaaatataaaaaaaattagttaggcgcggtggcgggcgtttgtagttttagttgattataggttgaggtaggagaatggcgtgaattcgggaggcggagtttgcgatgagtcgagatcgcgttattgtattttagtttgggcgatagagtaagattttgttttatagaaaaaaaaaaaatgttgtatgttgggattgtgttattagattttgtttattttttttaaaagttaagtgaggaaggtattgatattgattttattttatagatgagaaaatagaggttttgtattttgtataattagtaagtggtagagttaaatattaaagtttatgatttatttattattatatattatttcgtggttatttattacgtttttaagttttgttagttaacgtgtgaatgaaaatataattatttataaaggaaggttaaatgagtaagtgaattagtataaatttatttttttagttaaaagatttaaggattatatgatttttcgagtaattaaaggatttatttttaagttttgttagtagtgtggttttaaggtttttttggtttttttgttgtttgtattatagtaggttaaattggttttattaaagatatagtattttaggtttatagttatagaaataatattaattatttatttgatgtttaatgtgtatgaggtattgtggtgattttttatattttagtattttagtttgggtgatagtgcgagattttgttttaaaaaaaaaaaagtaaaaaaatttttaaaatttatattttaatttaagatgtatttttatatttttatatatatatacgaaagaaaagttttataaaataatgtttaattttgtagtatatgagttatgttttttttattgtttttattttttaaaaaatgttaattaagatttatttatggggttgggtttggtggtttatacgtgtaattttagtattttgggaggtcgaggtagagagattagttgaggttaggagtttaagattagtttggttaatatggtgaaattttgtttttagtaaaaatataaaaaattagttgggcgtggtggtgggagtttgtaattttagttattcgggaggttgaggtaggagaatcgtttgaatttaggaggtaaaggttttagtgagttaagatggcgttattatattttagtttagataatagagtaagatttcgttttaaaaaaaaaaaaaaaaaaaaaattatgagtttttgtttattgtttgataaatatttaggggatagtagtagttgtttgggaatggtttaagttttttgttttttttatttatttgtatgagattttagattgaagtaaatagttttttagagaatagtattaatttatttgtttttaattagttaaagttttaggttagtagtattttaattattttaagttttaaaggttttattttaggtttgttatgtgtatttatttagaaatgtttttaaatttgggattttagttaagtgaaattatgtagtataaatttttggaatatataaatatagtttagtataatttgtattttgtgtaatattggttttttgaattttttaagttttatattttttgtttataaattattatataggatttttgtgaggattaaataaaataatatttgtgaaatgtttagtataatgtttggtatttagtaagtgtttaaaaaattttagttgttttagtgtggttgttttttttttatgtgtttgaattgtagttgatatttttaataggtttgatgtattgatattagttagagatggattattattataaatttttattttaggttaaatattgagggatagataattttaattattttatttttagaaattgatagtagttatttttgtgatttttttcgagtagagttgatattaagtattttatttgttatatttaatttttagtaagaaagttatatattgtttgtaatatatgatgtttattttaaaattgtcgtttgtttagttgtttgtgtttttttgattcggttgatataaagggtaagatgatattgttttttatagagaggttttttttgtaatattaaatggatgtaattttttatatttaaaaaaagtagtttgttaatgatatttttatatttatatttattttattatgatatgttttaatttaagattataagtaatattagataatatattaatgttttttattttttttagg

SEQ ID NO: 68 - DNA, 8197 bp, Artificial Sequence
  chemically treated genomic DNA (Homo sapiens)
tttagaggaaatagaaaatattaatatattatttaatgttatttatgattttaagttaaaatatgttataataaagtgaatataaatgtaaaaatgttattaataaattgttttttttaaatgtaaaaaattgtatttatttgatattataaagaaggtttttttatgaagaataatattattttgttttttatattaatcgggttaaaggaatataggtaattgagtaaacgatagttttgagatgaatattatatattataggtaatatatggtttttttattaaggattgaatatagtaaataaaatatttggtgttaattttattcgaagagagttataaagataattattattagtttttagaaataaagtaattaaaattgtttattttttaatgtttagtttagaataaaaatttatagtgataatttatttttggttaatattaatatattagatttattaaagatgttaattgtaatttaaatatatggaagaaaagtaattatattagagtaattagaattttttgagtatttattaaatgttaggtattatgttaagtattttatagatgttattttatttaatttttataagaattttgtgtgataatttatagataaagaatgtgaggtttaggaaatttaaaaagttaatgttatataaagtataaattgtattagattatatttgtatgttttagaagtttatattgtataattttatttaattaaagttttagatttgaaggtatttttgagtaaatatatatagtagatttgagatggggtttttaggatttaaagtaattaaaatattattagtttaaagttttagttgattgggaataaatagattaatattattttttgaaaagttatttattttagtttagagttttatgtaaataaataggaagagtaaggagtttggattatttttaggtaattattgttgttttttaaatgtttgttaaatagtagataggaatttatgattttttttttttttttttttttgagacggagttttgttttgttgtttaggttggagtgtagtggcgttattttggtttattgaaatttttgttttttgggtttaagcgatttttttgttttagtttttcgagtagttgggattataggtttttattattacgtttagttagttttttgtatttttattagagatagggttttattatgttggttaggttggttttgaatttttgattttagttgatttttttgtttcggttttttaaagtgttaggattatacgtgtgaattattaggtttagttttatgagtagattttgattagtattttttaaaaagtaaaaataatagaaaaagtatgatttatatgttgtaaagttaggtattgttttgtgaaatttttttttcgtatgtatgtgtagagatataaaaatatattttaggttgaaatataaattttgggggtttttttgtttttttttttttgaaatagagtttcgtattgttatttaggttggagtattggaatatgaaaaattattatagtgttttatatatattaagtattaaatgaataattagtattatttttgtaattgtgagtttgaaatattatatttttgataaagttagtttaatttattataatgtaaataataaaaaaattaaaaaaattttaaagttatattgttgataaaatttaagagtaggttttttgattattcgggaaattatatggtttttgagttttttaattaagaaaataagtttgtgttgatttatttgtttatttggtttttttttgtgagtagttgtatttttatttatacgttggttgataaaatttagagacgtaatgagtaattacgaaatagtgtatgatagtgaataaattatgagttttaatatttagttttattatttattgattgtgtaagatataaaatttttgtttttttatttgtaaaatgaggttaatattagtattttttttatttggtttttggaaggaataaataagatttagtagtatagttttagtatatagtattttttttttttttgtaagatagagttttgttttgtcgtttaggttggagtgtagtggcgcgatttcggtttatcgtaagtttcgtttttcgggtttacgttatttttttgttttagtttgtagttagttgggattataggcgttcgttatcgcgtttggttaattttttttgtatttttagtatagacggggttttacggtggtttcgattttttgatttcgtgatttatttgtttcggttttttaaagtgttgggattataggcgtgagtcgtcgcgttcggtcgtatatagtattttaaatgatgagtgtttattaaatatagttaaggttttttggttattgtgttgtgtattgcggtgttaagagtatacgatgggggttgggtttatattttagttcggttattttggtaatgtagtattgagtaaatttaagttttagtttttttattaataaaataataataggattattttttagagttggtgggaaattaatataattaataatcgatgtaaagttttagtacggtgtttgaggtataagtggttaatattagttataattttattgtttatgtttttaataagtgttgttgttttaattttatatttataaattgtttttattaatttttttttttttatgtttaaatggaatatataaaagaaatgtataagtttagattataagtaatattttagtgtttttattagtgaggttttttcggatttgaaaattaagtagttattaacgtttcgggtttatttttttcgttttgttgtagtttttttattatcgttgtttattgatagtatttttcgtttgaatgtaagttttacggggcggagattgttttattgcggtatttttagtattttgattagtgtttggtatgtaatagatgtttagagtatatttgagaaaaattaattaattgaatgagttttagttcgattttaaaatcgttttttgtttgttttttaagaagggagttgaaagaggtaaagggcgttagggcgtttttcgttttttagtttttttttttttacgtattagaagggttattgaatcgttttaagggcgttttaggaaaggatatgttgacggttagttttagaaattgaaggtgattggtatttttcgataattgaatgcggattattattttttatcggttttaaatttaaatttttttatattttttatttatttcggcgttagttaattggaaagttaaatttttgggtatattaatttcgtataggaatacgaagaaagaatgttgggttttgattgcgtttaattagttggtttgcgagtttaggttgttatttaataggagatcgttattgtttttcgttttatttatttagttattttcggagttatttaagtgtaatttagtatttgcgtaagcgtattttttttcggagacgttagaaagtgtattttggcgttatttaggggacggtgtagtgagtttcggttttattggttttaattttgttttattgttcgttgtatgtgaatttttttggattttagtttttttattcggggtttgtcggtgtcgtaaacggttatttaaagggaaaaacgaatacgtatattaaagcgttagtttgcgtttttgcgtatgcgtagtgattcgagcggagaggtcgaggcgtagtttaagcgtgggatttcgcgcgtgcgttcggtttcgtttggtgcggtcgcggtcgggagggattggattatgtcggtttcgtttgaggagcggagtggggtggtatcgtgcgggatttcgtggggttagtggtattagattttggaggaggtgtttattgaagtttaggtgtcgttaggtacgcgcgtttaggatatttagtgcggtttttagagtcggtatgtggcgttgtcggtgggcggtcgcgagatttttaaggtagcggtagttcggggtttgtgtttagttttttttttttagacgtttttagtttcgtttttttgaacgattgttgggtgtttcgacggtttttgtggttggtagaaagagaaagaggataatattgattaggtttgggtttggttagagttttcgtttttttagggtaggtgttgagttgtggaaatttgaggagtttattttcgtgtttagtttttaaattaagattgttgtttttgtttttttgacgggttttagttgggaatagattaattaggttgttaaaggaataaatatttttttcgtgtattgaagataggtaggaagataatagataacgtatttgtagtggagaggttaagtttttgtacggaagcgtaatttataaatagataaatataggaaaggataataaagaaaatagggatagaataacgggtagagaatttagagatgatgttaggtgattagtttttttatttaaaagtttgaaaattttgtatgtttgtggagtggttaagtaggtggtgaagaggtgtgtgtataaaataagtagtattttttttatttttttttattaatgttttttggatttggattcgttttttttttgttaagtgtataattaaattaataggttgaaattagatttagtttttaggttagatgtttaagatgtttgatggtagtgtaatatggtgaagggagattatttgttttttagttttgtaaatttgggcgagagattgtttagtgtttttatattttttttatttataagataaggtagttatagtattttttttatgggattgttttgagtttaatatggtatttatttgtatgaagagtttggagtatttattggtatgtaataagtttatattatatgttagttattagttattatatatattatagtatatggaggtgttttgagtgttttaagattcgtgtgaaagatattatgttagtttggattttagttatttttttgaattgtataatttatagtttttttattaatggttttagattacgatttaaattagtaaatttagtaattttcggaatttagtagtagttgttgaatttgggatttttgatgtacgtatagattagtgggattttttttttattaattttgatatattttaaaatgtgggttttttttagtgatatttaattttattttttataatttaaatttggtaataaattaaaatggatttgagtttaggtattttttttttaaaaaaaaatatatatttattgagatagggtttttgttttttatgttggggtgtaggggtgagattgtagtttatagtagttttaaatttatggggttaagtaatttacgttggtttttaaagttttgggattataggtttgagttattgggtttggtgtagttttttttaaatttatattttgtttatttttttaaaaaatatgagtttgtgaatagttagttataattaatttattaaatttggaatacgtaaagtttttttaatgtcgattgtttaataaaaagattaaaacgtttttaaaagtttattttaaaaataatattttgtcgggtgcggtagtttatgtttgtaattttggtattttggaaggtttaggcgggcggattataaggttaggagttcgagattagtttggttaatacggggaaattttatttttattaaaaatataaaaattagtcgggcgtggtggcgggcgtttgtagttttagttatttgggaggttgaggtaggagaatcgtttgaattttggaggtggaggttgtagtgagttagatcgtgttattgtagtttgggcgatagagcgaaattttgttttaaaaaaaaaaaaaaaaaaaaaaaaaagataatattttttagttttagtaggagatttttttttgtggttaatttaaattggtagaattaaagtattttagatattaattttatatttggttagtggttagtattattgtattttttaaaaattaaggagttttgatttttttttagagagttttgtgttttttgttatagtaaatattttttgtagtgtaaattagtttttattttatttgttgggagaaaatttagggttgtgtatttataaatgttatggtgaagtggtggtataagatgtggattaggtaggaaagtaggtaaattttaattatgaaaattttataaaaattaaattttgtatttttagtattttatatgtttattttttagggtaaattttttgattttataatagttgatgagggaatatggattttgggtaagggtaattattataatttattaaattaaaataattttgttttgatattttttttttttttgtattaggttttttttgtttttgtagttttgaaagataaagtaatagaaatgtgttgaaaatcgttgtatgttaaagttatttagtggggggagaaaaaattagttagttgtttttggaaatataaaatttaatgaagaattttttgagattattttggttaatatggtaaaatttcgtttatattaaaaatataaaagttagtcgggtatggtggcgtatgtttgtatttttagttagtcgggaggttgaggtaggaaaattatttgaattcggggggcggaggttttagtgagtcgagattaagtcgttgtattttagtttgggtgagagtgatattgttttaaaaaaaaaaaaaaataatttgatgaagaattttaatttatttgtgcgtgtgtgtgtgtgtgttttttttttagaggatagaaaaatggttcgtattgtttttataaagataaagagagatgtagtaaattgttggatttttttattagaatttgaatatgtagcggatttttgggtgtaagattaaatgtagagaaagtttatattagagagattttaaaaagaagtaagttagatgaagtgtatgagtatgtgtaattaaatatataaaaattattaaataaatatttgaaattaaaatttaaatgttattatgaaaagttataaatattttttagaagaatttttaaagtgaattgttagaaaaatggttttttttgtatggatttgatttttcggaagatttttttgagaggaatttatttgtattgttgtgatttgtgagtttaagtttatttttatgtatattagtaatgtatgaataaatttttattatagttgaattaatatagatttatttagtgtaaaaagtgaaaggtttttttattattattttttttattttatgtatttattttatttttattttatatgttggttattgtttgttttgttttgttttttagtataaatggaggattatattgtgtgtattgttttttttgttgtttttttatttaataatatgttgtgggtttttttttttattaatatataggtataaaatttattttttttaattgttttagaggattttgtagtttggatgtgttattattatttggttgtttgtttttgatatgatttagatttttttatttttttttattttaaagaaagttgtgtttttatttttgtgaaattatttaagtgttttaagatatttttaagataaatatttaggagaggaattgttagattgtagtatttgataatgtacgtttttatgataatgatttttagatgtatatttttagtttagattttttttttgaatttaggatttgtatattcggttgtttatttaatatttttatttggttatttaatgtatattaagtttaatatgtttaagttgaatattttaatatttttttatatttgtttttatttgtagtttttttattttagttgatgaaaattagtagtttaggttaaaaaaaattgggatttatttttgatttttatattttttttatattttatttaatgtattaggaaattttattgatgttattttcgaaatatatttagaatttggttattttttattattaattttattattattttgatttggattatttttaatgttttgtttgattattttaataacgttttaattggtttttttatttttatttttgttatagtttttttaaaatagtagttagagtagttttttttttttttttttttttgagatggagtggtgcgatttttgttgattgtaagtttcgtttttcggattttcgttagttttttgttttagtttttcg

SEQ ID NO: 69 - DNA, 6124 bp, Artificial Sequence
  chemically treated genomic DNA (Homo sapiens)
gtttcgaatttttgattttaggtgatttttttgttttggttttttaaagtgttgagattataggtgtgagttattgtatacggttttaaattttatttattatttatttatttatttatttagagatttagttttattttgttgtttaggttggagtgtagtggtatggtttcggtttattgtattttattttttgggtttacgttatttttttgttttagtttttcgagtagttgggattataggcgtttattattattttcggttaatttttgtatttttagtagagatggggttttattgtgttagttaggatagtttcgattttttgatttcgtgattcgtttgtttcggttttttaaagtgttgggattatttattttgttttttgtagagataggtttttattgtgttgtttaggttggttttgaatttttgattttaagtgatttttttattttagttttttaaagggttgggattataggggtgagttattgtattttattttttttttattttttgacggtttttttttgttatgaatgtgtatgtttagttgtttgttttttagaattgatatttattttttttatttattagttattggaggaggattgggatcgtttagattattgatttgatttattttttcggtagggttttttggtggttgttttttattattaaaattggaattagaagagtttttatagttttttttttttttttatatttttgttgaagtagagttttgaaaaataaaattataaattaagttattttttagaagaaatttgtaattaaagataagttttgtcgggtatagtggtttacgttttttggaggttaaggcgggcggattatttgaggttaggagttttagatttgttaggttaatatggtaaaattttatttttattaaaaatataaaaattagttagatgtggtggtgggtatttgtagttttagttatttgggaggttgaggtaagagaatcgtttgaatttgggaagtagaggttgtagtgagtcgagattgtattattgtattttagtttgggcgacggagtgagacgattttataaaaatttatataaataaaatgaaaagtaaaataaaaatataaaagttggtcgggtgcgtttgtttacgtttgtaattttagtattttgggagggtgaggtaggtagataatgaggtaagaagatcgagattattttggttaatacggtgaaattttgtttttattaaaaatataaaaaattagttgtgcgtggtgatacgtatttgtagttttagttatttgggaggttgaggtaggagaattatttgaatttgggaggtggaggttgtagtgagtcgagatcgtattattgtattttagtttgggttatagagtgagattttattttgaaaaaaaaaaaaaatataaaagttagttaggggtgttggtgggtgtttgtaattttagttatttgggaggttaaggtagaagaattttttgaatttaggaaacggaggttgtagtgagtcgagattatatttttgtattttagtttggataatagagcgagattttgttttaaaaaaaaaaaaaaaaaaaaaattaaataggtcgggagtagtggtttatgtttataattttagttttttgggaggttaaggtaggtggattatttgaggttaggagtttgagattaggttggttaatatggtgtaatttcgtttttattaaaaatataaaaattagtcgggtttggtggcgtatgtttgtaattttagttattcgggaggttgaggtaggagaattatttaaatttgggaggtaggggttgtagtgagttgagatcgtgttattgtattttagttagggtgatagagtgaaattttgttttaaaaaattaaaaaagaaatttagtaagtaatgagttaaggaattcgaatattaaggcgagtgataaggaacgtttaggatgtggtttaggatggagtaggggggatatttatttaggagaaagtttaggttataagataggaggagttagttttgttggggttgaagggaagagtattttaggttgagggaattgtaaggcgtttgtatgggatattatgggatggtttttgtttttggtgggtagtttttggtttgaggttattttttggtttgtttgattgtttggtaatcgggaggaagttttgttttttttggagatagaaataaaggtttaggaaatatttgttttttttttttttgaaaaacgtttaagggaacggaggattgggaggtgtcgtttttttttgttagtttgttttttattatagttattttatttttattttagaaagtgattcgttattttttaaaaggttcggattttgattaaggagttattttttttgttttagtatttttagttggtttagtttttaaaacggatgttaaatttagttttttttttaaggatattgtttagtttaggttttattattatttatttggattagaatagttatttttttttttattttttggttgtagtttttgaagttttaattgggtttttgtgaatatttgagttagggtaaggttttttttttgtttagaattttttatattttttatttcgttgggtataaaagttaaagttttggttaggtacggtggtttatatttgttattttagtattttgggaggttaaggggggcggattattagaggttaggagttagagattaatatggtgaaattttatttttattaaaaatataaaaattagttaggcgtggtgacgtatttttgtagtattagttattcggtaggttgaggtgggagaatcgtttgaatttgggaggtagagtttgtagtgagtcgagattatattattgtgttttagtttgggtgatagaacgagattggggtttagaaataaataaataaaataataaagttttttttaggtgataggaatttgtatttatttgttttgttatttttttgttcgttttttttttcgaattttttttttgttaagtttgttttagttatattgtttttttggttgtttttttttttttttttttttttttttttttgagttttatttttatttaggttggagtgtagtgtttttattttggtttattgtaattttcgtttgtcgggtttaagagatttttttgtattagttttttaagtaggtggaattataggtgtgtattattatattcggttaatttttgtattttgtatagagatgggggtttttttatgttgtttaggttggttttgaatttttgggtttaagtgatttttttatttcggttttttaaaatgttgggattataggtgggagtcgcgtttaggtggatttttgtttgattttgtttatttttgtgtttttagtatttggaaggacgttaagtatatagtaggcgtttaaaaaatattgagttatatgttgagaaaagaacggtattattgtggttgtaagtgggatttgggtcgcgcgggggagttcgcgtatttcgggtcggggtaagagtttagtggaattcgttcgaggaagaattcgtggcgtaggatttttttaggttttttgaggattaggggcgtttttcgttttattttgtgattttgtttaggtcgtttcggggcgggaatttagaattttttagttttttaagaaaaaaatattttcgtggaaattttttgggaatgatcgaggcgggggaaatatgcgtttttggatggttagtgattcgtagttttttttttcgataggaagggtttgcgcgttcggggatttttcgtttttttttttgttgcgcgatttttttggtttttcggagatttttatggcgacgtcgcgcgcgttttataataggaaagttttaggcggcgcggtttggtgttcggagatttaagagtatttagtttcgacgtggtggatgtcgagttttggggttatacgtataggcggtggttaagtaaatattcgtttatatttagtgtatgagtttgggttcgagttgtcggagtttcgcgcgtagggtaggggttcgagcgttttttttttttgtttcgtttttgcgtttgggggttgttgttttagttttttagcgataggtagggatttcgagcgttttttttttttttttcgttaagatttaagttagttgttttagttttttcgcggagtttgggacgttagcggaggggttcggcgcgtagggattacgtagttttttttttttttttgggagttgtaaagacgttttcgcggttaaggtcgaaaggggaagcgaggaggtcgtcggggtgagtgttttcgggtgtagagagaggacgtcgattttttcggacgtggtgagatcgcgtttcgttatttttacggttagcggtcgtcgggaggtgtttggttttgttttggtcgtttttcgagaaatgttcgtgttagttaggtgtggacgtgatttagggggaggggtattttttagtggagggagttcggggaggatttttgggtttttatttaggtagggggtttatttattcgattaaagaggtttgcgtaagttggagagggaggatttgagttcggattttttcgtagtttggagttttagtttatcgttttgtgaaatggatataataatagtttttatttttcggggaagttggtagtatttaaaagtatttaataaatcgtttagcgcggtgtagatcgtgatttaagtttagtttggtcgggaaacgggaggcgtggaggtcgggagtagttttcggggttatcgttttgttatcgtcgttcgattgttttagtttggaaatttcggagttgaagcggttagcgagggaggatgattttttcggttcgggtattttgttagttcggaaataattgtagtatttgtttcggaggggaaggcgcgaggttttcgggaaagtagtatcgttttttggtttttaggtggttagcgttataaaggattacgcgttttagtcgacgttgagtttttttgttatttagagttgtaattttagtttcgttatggtttttagtagttttcggttcgcgttgttcgtatttttggttttgttcggggttttgtttttaggtgagtcggggtggggattgtcgtcgggttagtttttcgaagtttcgggaggatcggttttcgggttaggttatgtatgtttaggtagttgtttatgggaaggaggggttagagatagcgattgaaaggtaatagttagtaggttcgaatttagattttgtatatttttacgtgtggttttgggttatagattgtagttttaaaaaagggtagggggttggagatggaggggaggggcgggtttcgttttgttgtttaggtcggttttgaatttcgggggtttagttttattttttgttttagtttttcgagtagttgggatgagaggtgtgaattatcgttttgtttggttagattgcgttttttatagttttttagttgtaaaacgggaaacgttatagcggttatttggtagggtattttggtttagcgtagtatttggttttaggattcgattatgatggtttgggaatttggttttgtgttaatttaataaggtttaagggatttttattttttttaagatgtatattttgttttttattttttttgtttttggggaagtttagggttgtttttatttgggggaattttagagttgatttattcgtggtttaaagttgagaagtgggacgttttagtatatttttttttagttttagtttagttagggaagagggaaggggttagagggttttttatggtggtgtaagtttggggaattaggagggtgggagattgatagtttggttaatagtttaataaagtttgagatttaggttagtacggtagtttatgttagtaattttaatattttaggagttttaggcgggcgaattatttaaggttaggagtttgagattagtttggttaatatggtaatatttcgtttttattaaaaatataaaaattagttggtatggtggtgggcgtttgtgattttagttgttcgggaggttgagggaggaaaattttttaagtttacgaggttgaggttgta

SEQ ID NO: 70 - DNA, 6124 bp, Artificial Sequence
  chemically treated genomic DNA (Homo sapiens)
tgtaattttagtttcgtgggtttaagggattttttttttttagtttttcgagtagttgggattataggcgtttattattatgttagttaatttttgtatttttagtagagacgggatgttgttatgttggttaggttggttttaaatttttgattttaagtgattcgttcgtttggggtttttaaagtgttgggattattggtatgaattatcgtgttggtttggattttaggttttgttgagttgttaattaagttgttaattttttatttttttggttttttaaatttatattattatgaaagattttttgatttttttttttttttttagttgggttggagttgggggagggtgtgttggggcgttttattttttagttttgggttacggataagttagttttggaatttttttaagtagaagtagttttggatttttttaggggtagagaggatgaggaatagaatatatattttgaggggggtgggggttttttaagttttgttgggttggtatagagttaagtttttaaattattatgatcgagttttggggttaggtgttgcgttgggttaagatattttgttaggtggtcgttataacgtttttcgttttatagttgagaaattgtaagagacgtaatttagttaagtaaggcggtggtttatattttttattttagttattcgggaggttgaggtaggaggtaaggttagattttcggagtttaagatcggtttgggtaataaaacgaggttcgttttttttttttatttttaattttttatttttttttaaagttgtaatttatagtttaaggttatacgtggaggtatgtagggtttggattcgaatttattggttgttgttttttaatcgttgtttttagttttttttttttataaatagttatttaagtatgtatgatttgattcgggagtcggttttttcggggtttcggagaattggttcgacggtaatttttatttcgatttatttgggaatagagtttcgagtaggattaggagtgcgggtagcgcgggtcgggggttgttgggagttatagcgaggttgaggttgtaattttgagtagtagaggagtttagcgtcgattggggcgcgtgattttttatagcgttagttatttgggggttaaggggcggtgttgttttttcggaaatttcgcgttttttttttcggaataaatgttgtagttattttcggattgatagggtgttcgggtcgagagggttattttttttcgttggtcgttttagtttcggaatttttaagttaaagtaatcgggcggcggtggtagggcgatgatttcgggggttgttttcggtttttacgtttttcgtttttcggttaggttaagtttgaattacggtttatatcgcgttaagcggtttattaagtatttttaaatattgttaattttttcggagagtggagattgttattgtgtttattttataaagcggtaaattgagattttaggttgcgagggggttcgaatttaagttttttttttttagtttacgtaggtttttttaatcgagtggatgagttttttgtttgggtgggggtttaggaatttttttcgggttttttttattgagggatgtttttttttttaggttacgtttatatttagttgatacgggtatttttcgagaagcggttagagtagagttaggtatttttcggcgatcgttaatcgtgggagtgacgaagcgcggttttattacgttcggggaaatcggcgttttttttttatattcgagggtatttatttcggcggttttttcgttttttttttcggttttggtcgcggaggcgtttttatagtttttagaaaaaggaaggaagttgcgtgatttttacgcgtcgagttttttcgttggcgttttaggtttcgcggggaaattgaggtagttagtttggattttgacgagggaggggagggggacgttcgaaatttttgtttgtcgttgggaaattgaggtagtagtttttaggcgtagaggcgaggtagggagaaggggcgttcgaatttttgttttacgcgcgaggtttcggtaattcgaatttaggtttatgtattaaatatgagcgggtgtttgtttggttatcgtttgtgcgtgtgattttaagattcgatatttattacgtcgaggttgggtatttttaagttttcgagtattaagtcgcgtcgtttaaggtttttttgttgtggggcgcgcgcggcgtcgttatggagattttcgaggggttagggaggtcgcgtagtagaaggggaagcgaagggttttcggacgcgtaggttttttttatcggggaagggggttgcgagttattggttatttagagacgtatatttttttcgtttcggttatttttaaggaatttttacggggatattttttttttggggggttgaggagttttgaattttcgtttcggaacggtttgagtaaagttatagggtgggacgggggacgtttttggtttttagaaggtttgggaaaattttgcgttacgggttttttttcgggcgggttttattgagtttttgtttcggttcgaggtgcgcgagttttttcgcgcggtttaagttttatttgtagttataatggtgtcgttttttttttaatatgtggtttaatgttttttaagcgtttattgtgtgtttggcgtttttttaggtattggggatataggaatgaatagagttagataaaaatttatttgggcgcggtttttatttgtaattttagtattttgggaggtcgagatgggaggattatttgagtttaggagtttaagattagtttgggtaatatagggagatttttatttttatgtaaaatataaaaattagtcgggtgtggtggtgtatatttgtaattttatttatttgggaggttgatgtaggagaattttttgaattcggtaggcggaggttgtagtgagttaagatagaggtattgtattttagtttgggtgagagtgagatttaaaaaaaaaaaaaaaaaaaaaaaaaaaggaatagttaggagaatagtgtggttggagtaggtttagtaaaggagagattcgaggagaggagcgggtagggagatgatagggtagataggtgtaagtttttgttatttgaggaggattttgttgttttgtttgtttgtttttgaattttagtttcgttttgttatttaggttggagtatagtggtgtgatttcggtttattgtaaattttgttttttaggtttaagcgatttttttattttagtttatcgagtagttggtattataggggtgcgttattacgtttagttaatttttgtatttttagtagagatggggttttattatgttggtttttaatttttgatttttagtgattcgttttttttggttttttaaagtgttgggataatagatgtgagttatcgtgtttggttaggattttggtttttatgtttagcgaggtgggaggtatagagggttttgagtagaggaaggattttgttttaatttaagtgtttataggggtttagttgaggttttaagagttgtagttaggagatgggagaggaggtgattgttttagtttagatgaatgatagtggggtttggattgggtagtgtttttggagaaagggttgaatttgatattcgttttggaggttgggttaattggaggtgttgggataagggggatgattttttgattagggttcgagttttttggaggatggcgggttattttttgagatgggagtgggatggttatggtagggggtaggttggtagagagagacggtattttttagtttttcgtttttttaagcgttttttaaggaaaagggaagtagatattttttagatttttgtttttgtttttaggaagggtagggttttttttcggttgttagatagttaggtaggttaaagaatggttttagattagaggttgtttattaagggtagaagttattttatagtgttttatgtaaacgttttgtagtttttttagtttggaatgtttttttttttaattttaataaggttggttttttttgttttgtggtttgagtttttttttaaatgagtgttttttttattttattttgggttatattttgggcgttttttgttattcgttttaatattcgaattttttaatttattatttgttgaattttttttttaattttttgagatagagttttattttgttattttggttagagtgtagtggtacgattttagtttattgtaatttttgttttttaggtttaagtgatttttttgttttagtttttcgagtagttgggattatagatatacgttattagattcggttaatttttgtgtttttagtagagacggggttatattatgttggttagtttggttttaaatttttgattttaagtgatttatttgttttggttttttaaagggttgggattataggtatgagttattgttttcggtttatttagttttttttttttttttttttttgagataaagtttcgttttgttgtttaggttggagtatagaggtgtgatttcggtttattgtaattttcgttttttaggtttaagaaatttttttgttttagttttttaaatagttgggattataggtatttattaatatttttggttaatttttgtatttttttttttttttaagatggagttttattttgtggtttaggttggagtgtagtggtgcgatttcggtttattgtaatttttattttttaggtttaagtgatttttttgttttagttttttaaatagttgggattataggtgcgtgttattacgtatagttaattttttgtatttttagtagagatagggttttatcgtgttagttaggatggtttcgatttttttattttattatttgtttgttttatttttttaaagtgttgggattataggcgtgagtaaacgtattcggttaatttttgtatttttattttattttttattttatttatgtaaatttttgtgaggtcgttttatttcgtcgtttaggttggagtgtagtggtgtaatttcggtttattgtaatttttattttttaggtttaagcgatttttttgttttagttttttaggtagttgagattataggtatttattattatatttagttaatttttgtatttttagtagagatgaggttttattatgttggtttggtaggtttagaatttttgattttaggtgattcgttcgttttggtttttaaaaggcgtgagttattgtgttcggtagagtttatttttgattatagattttttttggggaatagtttagtttgtggttttgttttttaaaattttgttttagtaaagatgtggggaaaaaaaaagggttatggaaatttttttgattttagttttggtgatggaagatagttattaggaaattttgtcgaaagaatgggttagattaataatttgagcggttttagtttttttttaatggttgatggatgaggaaggtaaatattagttttaagaagtagataattggatatgtatatttatagtagaaggaaatcgttaaaaagtagagggaaggtggggtgtagtggtttatttttgtaattttagttttttgagagattgaggtgggaagattatttgagattaggagtttaagattagtttgggtaatatagtgagaatttgtttttataaaaaataaaataagtaattttagtattttgggaggtcgaggtaggcggattacgaggttaggagatcgagattattttggttaatatagtgaaattttatttttattaaaaatataaaaattagtcgggagtggtggtgggcgtttgtagttttagttattcgggaggttgaggtaggagaatggcgtgaatttaggaggtggagtgtagtgagtcgagattatgttattgtattttagtttgggtaatagagtgagattaagtttttaaataaataaataaataaataataaataaaatttaaggtcgtgtgtagtggtttatatttgtaattttagtattttgggaggttaaggtaggagaattatttgaggttaggagttcgagat

SEQ ID NO: 71 - DNA, 6381 bp, Artificial Sequence
  chemically treated genomic DNA (Homo sapiens)
agtattattattgtttttttagagatagggtttttttgtgttgtttaggttgattttaaatttttgggtttaagggatttttttgttttagttttttaaagtattaggattatagatatgagttattatgtttagttgttattaatatttattttttgtttttttgaaaatagttattttaataggtgtgaagtgatattttattgtgggtttaatttgtatttttttaataattagtgatggtgggtattttttaatatattttttggttatttgtatgttttttttttttgagatggagtttcgttttgttatttaggttgaagtgtagtggcgcgatttcggtttatcgtaatttttgttttttaggtttaagtaatttttttgttttagtttttcgaggagttgagattataggcgtgtgttattacgtttagttatttttttgtgtttttagtagagatagggttttatcgtgttagttaggatggtttttattttttgattttatgatttatttatttcggttttttaaagtgttgggattatgggtgtaagttattacgtttggtttatttgtatgtttttttttgagaaatgtttgtttaggttttttgtttatttttgtttattttttttatttttttttttattttgataatattatatggtattaaataaagtttaagagatattgggttggtttgtgtttattttaaaattgtgttttttttttttgttattgagttgtttgagttttttatatattttggatattagttttttattgtatgtatggtttgtaaatatttttttttattttttatataatttaaaatgtgtttttttttttaaaaattttaagttagaattttagaatgttttaattttaatttttttttatatatttttatttagtattttagttttgaatttttaaaattttttaaaataaatattataatgattaatattattattattgtaaataatatttgtttggagttgtgtatttatttgttattttatttttttgtttttttttgtatagtaaattgttttgtaattattttttttttttattgaagtatatttgtaaatgtttatttaggtattttgggggataaattttttgtttatttgtttttgttaattttggtttttgaaagatggttttgttgggtatataattttaatagtttttttttttttttttttaaataagagaggaaagttattggattaggattttgttagagtataatttttttaaagttttgtgggagagatgagtttattttttaaattgagattttaattttttttttttttaaaaatttttttacgttttttagaattattttaatttttttagttttatagtttttttttttgagaaatttagggatttagagagtaaaataggagatattttatggtgaaaataattttttaggaaggatttcgagtttttttttttttttatattatggttagtttttttttatttttgtgttataggattaataggtgtgtaggtttattgttgtgtagtaataggttaattatattgatatagtagggttttttgtagagaaaaagtttaatgatttcggggtgttaaatgaggagatcggggagatcgttaaatttatttttttaaagagttttgggttgggattttagaggatattgtggagggtaagaggttggtaaattggggttaatgattggtcgaggtaaggggataaaattattggaatatggaaattgtatttttttgtgagttagttttttttggggttttttaggttagttggtattaattgggttttgtagattggttggtattagtggggttttttagattagtttgtatgagtatttttattggtatgtaggatttgaaagaatattttaaagggaaaatttaatattttataatgtttaagttgttatttttagagtagttaagggaattttaattttatgatagagtttgtataattttggggtaataggtatcgagtaattatgaggaagtaggtcgagagtatgttgatttaatgattaatgttgagtgtgttgtaagttttttttttgtcgtggatattttgtagggtaagttttatagtaattttttgtatgtaaggtggtgggtatttgtaattttagttatttaggaggttgaggtaggagaattatttgaatttaggaggcggacgttgtagtgagttgagattgtattattgtattttagtttgggtgatagagcgagattttattttaaaaaaagaaaatttttgtgtaggtttaatttaaagtgtttatttttaaggagtaaggtattatgattggttttgtttatattataaggttagttttgtggatttgggaagtagagattttagtagtagtaggaggaagatgttggataaaaaaaaaaaaaatagtaaatgtttaggatttaaaattaaaaatagttttcgtttaggtttgtttaggataaatttttttatttatttattaatttatgtatgtatttatttatttattaatttaataatgatgaagtatttattgtgtgttaggtagtgttttatattgggtggatgtagtagtatatgagatttagtttttgtttttattgttgatgggttagtggggaggtaggaaggttgatgtgttaacggttagaatatagtaattatttttaataaatagatggttatatgttcggtgtgttttagttaagtagggtttgtttaggaaggatgggagatattataggaggagatggggggtaggaattggggtttgtgttttcggggaggacgttgggttgtagaagttttgtttgaagagggaattaggttggttttgttgtgtatgtaggtgggatttttaagtattgttttttttagaagttgtttggagtattttaggtatggattattttatttttttatagttttttatagtgaggtaggttttagaatttttttttggttttttgttatgttgttttttttttttgagggttttttgggaattaggtttttaataattttttttttgcgtttgttcgggcgggttttaatagttattatggtaggttattatttatggtgattttattttttttaggtatgtgattttgaataagttatttaattttgacgtgttttagtttttttatttgtgagatggagatagtaatagtatttgttttagagagttaggggattaattggttaatatttatagagtgtttgtgatagtgttcgatttgtagtaagtaaatgtttattattattattattgatgttgttattgttattattattttgatttagtggaggatatagagtttttattatagtaatgtttttatttttatttttttgttttagtttttggtttgggttttaggagtgttttttgtttttaggattttgttggttttatatgaaattagatttttttaggttgggggtgaaattttattttgttttttttttttttgttggttttaggttttgtttttttttttttgtattatttttaagtttagtaatttcgtttagggatttttttgggtttaggttgataatggtagtttttgatggttgtgtatagtagtaatcgtttttgtttttagtagtgagggaagggtaggattttattttgtttttttaattcggaatggagtttggttaaagttttgaggattttggggtatttttttggaaaggttttattaggggtttttttgagaaagtaagaagttttgttttttttttgtttggttgtaaaagggattttaggtagaattgagggatgagattgtgtggcgattttttaggaaggttttttcgtttattgaaattttttttttatttgtttattgtttttgcggatttttttttaggaataaagtgaaatattttaggttttaatttttttaatttaaggtttttttttggagggagagagaggatggaggatattaggtaggttaggaaatgaaggttatggtttgggggtgtggttgtagttagattgattttattttttgtttgtgtttgggttgttggggattattatgggatgtattttttgaggttttgggttttaagttggttttgaattagttgagttaagattaagtttaggttgaaaattgagtgagggttaggtgcggtggtttaggtttgtaattttagtattttgggaggttaaggtaggtagattatttgaggttaggagtttaagattagtttagataatatggtgaaattttatttttattaaaaatataaaattagttgggtgtggtgacgcgattttgtaatgttagttattttggaggttgaggtaggagaattgtttgaatttgggaggtagaggttgtagtgaattaaaaattgtgttatagtattttagtttgggcgataagagtgagattttattttaaaaaaaaaaagaaaaagaaaaagaaaagaaaattgagtgggatgtgaaggtttatgtagaattgtattaggtatttagtaggagaagtttaaattgttttttaggtttttttagaaaagtttaagttattgtttttttttgttatggtaattgtaagttttggataggttttggtttttggatgtttgttttttaggtatgattttaataatgtattttatgggatttggggttttttagatttggggtttgtaggtttgatttttttttgtgtatacgttttatatacgtatgcgtgtatttattgtttgtttcgttttttgtatagggagttagtagggaggattgggttatgttttgtttattagtagttttttagttttttttgtttggatttttagaggtttggggttttagaacgagttggtgtacgtggttttttaaagattttttagataatgagaggaaatgtagttattagtttgtagaaggttagggattttgggttatagtttagatttgcgtttattatttttttttaggtagtttttggttggtttttgcgagttcgtggagattgttagagatgttttttttcggttataggattttgattgtggttttttttattttgatttgttgtttaggtaagttagttttttggggtttttgatttggtatatgttagtcgagagggtgggggtgttttgttttttgtggttttaggtggaagagaagttttaaaagttgttgaggtttttaggtttttttgttttgttttaagatagggtttcggtttattatttaggttggagtatagtggtatgattatggtttattgtatttttttgggttcgggtgatttttttattttagttttttgagtagttgggattataggtgagagttattatgtttagttaatttttgtattttttgtagagatggtaggggttggtttcgaatttttggatttaagtgatttattcgttttggttttttaaagtgttgggattataggtatgagttattatgtttagtttgttgaagttttttaaattttttatttttattataggtaggtttttgttttgttgtttaggttggagtgtagggtgtgattatagtttattgtagtttttaatttttgggtttaataatttttttgttttagtttttgtattgttggttttttttttttggattattgtttttaagtatttgtagggcgtgttacgtttttgtatgtttttgtttatagagttattatttgggtgaggtttttattgagtatagtatttaaagtggttttatttttattttttgttttttttttcggcgtttttttgttatttgatcgttgggtgttttgtttgttattgtttattggagtttcgttagggtagtgtttggtttattgtgattattgttgtatttttagagtttgatgttttggatatagtaggtgtttaaaaagtgtttgtgtaagaaaggaagggagggagggttatagagggttttttgtgggagggttttatgggggaggggatatttgggttgattttaaagattgagtcggattttattttatggagttggagtatagtttgaggaagattaatttggagttgatgggtagatgggttggaggaaggagagttagaggtagggtgttagttagggggttggaggaaggatagttagaggtagggagttagttggggggtggttttttggtttagtcggggttatgatatttgataaggggaaagtagtagcggggtttttaatgattttttttttttagtttttgatttaggagttagattgttttaatggatagttttattggagggtagggggtggggggatgatacgattgtttagtgtttttggttttttagg

SEQ ID NO: 72 - DNA, 6381 bp, Artificial Sequence
  chemically treated genomic DNA (Homo sapiens)
tttggaaaattagaaatattgggtagtcgtgttatttttttattttttgttttttagtggagttgtttattgaggtagtttggtttttgggttagggattgaagaggaaaggttattggggatttcgttgttattttttttttgttaggtgttatggtttcggttagattaggaggttattttttagttggttttttgtttttggttgttttttttttagttttttagttgatattttgtttttggtttttttttttttagtttatttgtttattagttttagattagttttttttaggttgtgttttaattttatggagtgggattcgatttagtttttaaggttagtttaaatgtttttttttttataaagtttttttatagagggttttttgtagtttttttttttttttttttttgtataaatattttttgaatatttgttatgtttaaagtattaggttttggggatatagtagtgattatagtagattaaatattgttttggcggagttttagtaaatagtgataggtagagtatttagcggttagatggtaggaaagcgtcgagaaagggagtagggagtgggggtgaggttattttaaatattgtgtttaatgaaggttttatttagatggtgattttgtgggtaaaggtatgtaggggcgtggtacgttttgtagatatttgggggtagtgatttaggggaagggggttagtagtgtaaaggttggggtaggaggattgttgagtttaggagttggaggttgtagtgagttatgattatattttgtattttagtttgggtaatagaataggaatttgtttataataaaaataaaaaatttaaaaagttttagtaggttgggtatggtggtttatgtttgtaattttagtattttgggagattaaggcgggtggattatttgagtttaggagttcgagattagtttttgttatttttataaaaaatataaaaattagttgggtatggtggtttttatttgtgattttagttatttaggaggttgaggtgggaggattattcgagtttagggaggtgtagtgagttatgattatgttattgtattttagtttgggtgatagatcgagattttgttttaaaataaaataaaaaaatttaagaattttagtaatttttgggattttttttttatttgaagttatagggaatagggtatttttattttttcggttggtatgtgttaaattaggaattttaggaaattggtttatttggatagtagattagggtgaagagggttatagttagggttttgtaatcgaaagaggatatttttggtagtttttacgggttcgtagggattagttaagggttgtttggagggagatggtgggcgtaggtttgagttatggtttagaatttttagttttttgtaaattgatgattgtatttttttttattatttgagagatttttgggaagttacgtgtattagttcgttttaggattttaggtttttaagaatttaggtagaggaagttgggaagttgttgataagtagggtataatttagttttttttgttgattttttgtgtaaggggcggggtaggtaatgggtgtacgtatgcgtgtatgagacgtgtgtataggggagagttaggtttataagttttagatttggggaattttaaattttatgggatgtattgttggagttatgtttgggagataagtatttaaaggttaggatttgtttaggatttgtagttattatagtaaaaggggatagtgatttgggtttttttaaggaagtttggagggtaatttgagttttttttgttaaatgtttggtgtaattttgtataaatttttatattttatttagtttttttttttttttttttttttttttttttttgagatggagttttatttttgtcgtttaggttggagtgttgtggtataatttttggtttattgtaatttttgttttttagatttaagtaatttttttgttttagtttttagagtagttgatattataggatcgcgttattatatttagttaattttgtatttttaatagagatggggttttattatgttgtttaggttggttttgaatttttgattttaggtgatttgtttgttttggttttttaaagtgttgggattataggtttgagttatcgtatttggtttttatttagtttttaatttagatttgattttgatttagttgatttagggttaatttgaggtttagagttttaggaaatgtattttataatagtttttagtaatttaggtatagatagagaatggggttagtttggttgtagttatatttttaaattatggtttttattttttggtttatttgatgttttttattttttttttttttttaggagggagttttgggttgggagggttggagtttgaggtgttttattttatttttagggaggaattcgtagaagtagtgagtaggtaagggagggattttaatggacgagaggatttttttgggggatcgttatatagttttattttttagttttgtttaagattttttttgtaattaggtagggaaagagtaggattttttgtttttttaggggaatttttgatggggtttttttaaagggatgttttagaatttttaggattttggttaagttttatttcgggttgggagggtagggtgaggttttgttttttttttattgttgagggtaaaggcggttattattgtatataattattaagggttgttattgttagtttggatttagggaagtttttggacggggttgttggatttgggaatgatgtagggaggaagaggtagggtttggggttagtagagaaaaggagaatagggtggagttttatttttagtttgaaggaatttgattttatgtggggttagtaaagttttgagagtaggaaatatttttgaaatttaagttaggggttgggatagaagggtggggatggggatattgttgtagtggagattttgtgttttttattgagttagaataataataataataataatattaataataataatagtaaatatttatttattataagtcgggtattgttataagtattttataaatattaattaattaattttttaattttttgaggtaggtattgttattgtttttattttatagatgggaaaattgaggtacgttaaggttaaatgatttgtttaagattatatatttagaaaaaatgaagttattatgaatgatagtttgttatggtgattgttgaagttcgttcgagtaggcgtaagaagaggattgttaggagtttggtttttaggagatttttaagagggaaaagtaatatagtagaaggttagaggaaggttttggggtttgttttattgtgagggattgtgggaaggtggggtgatttatgtttggagtgttttaaatagtttttggaagggatagtgtttgggaattttatttgtatatatagtagggttagtttgattttttttttaagtaaggtttttgtagtttaacgtttttttcgaaagtataggttttagtttttattttttatttttttttgtgatgttttttattttttttgggtaggttttgtttggttgggatatatcgggtatgtgattatttatttgttagaaatagttattgtattttaatcgttgatatattaatttttttgtttttttattggtttattaatagtgagggtagaagttgaattttatgtattgttatatttatttagtgtaggatattgtttggtatatagtaggtgttttattattgttgaattggtagatggatgggtgtatgtatggattagtgaatgaatgagagagtttgttttaaataagtttgggcgaaggttgtttttagttttaggttttaagtatttattgttttttttttttttgtttagtattttttttttgttattgttaaagtttttgttttttaagtttataaggttgattttataatgtaaataaggttaattatggtattttattttttgaggatgggtattttgagttaggtttgtataaaggttttttttttttgagatggagtttcgttttgttatttaggttggagtgtagtgatgtaattttagtttattgtaacgttcgttttttgggtttaagtgatttttttgttttagttttttgagtagttaggattataggtgtttattattttgtatatagagagttattgtggggtttgttttataaaatgtttacgataggaaaagagtttgtagtatatttaatattaattattaggttagtatgttttcgatttgtttttttatagttgttcggtgtttattgttttagaattatgtagattttgttataggattagagtttttttaattgttttaaaggtaatagtttgaatattataaaatgttaagttttttttttgagatatttttttaggttttgtatattagtgaaagtatttatgtaggttggtttgaaggattttattgatgttagttagtttgtaggatttaattgatgttagttggtttgaaggattttaagaggagttgatttataaaagaatgtagtttttatattttagtgattttatttttttatttcgattagttattgattttagtttattagttttttgttttttataatgttttttaaaattttagtttagaattttttggggagatggatttgacggttttttcgatttttttatttggtatttcgggattattaaattttttttttgtaggaaattttgttgtgttagtgtaattggtttgttgttgtatagtagtgggtttatatatttgttggttttgtaatataggaataagaggaaattgattatgatgtagaagagagaagaaattcggggttttttttggaaaattgtttttattatgaaatgttttttgttttgttttttggatttttaagttttttaaggaagggggttataaaattggaggagttaagatagttttggaaaacgtgagagaatttttgaggggaggggagattagagttttagtttagaaagtgaatttattttttttatagagttttggaaggattatgttttgatagggttttaatttagtgattttttttttttgtttgaaagaaaaaaaaaaaaaattattagaattgtgtatttagtaaaattattttttaagaattaaagttaataaaaatagataaataaaaagtttattttttaaaatatttaaatgagtatttataaatgtgttttagtaagaagaaaaaatgattatagaatagtttgttatgtaaagaagggtaagaaaataaaatggtaaatgagtatataattttaaataaatattgtttataataatggtaatattaattattataatgtttattttgagaagttttagaagtttaaaattaaaatattgggtaagaatatataaggaaggattggagttaaagtattttaaggttttaatttggaatttttaggagggaggatatattttaagttatataaggaatgggagaaaatatttgtaagttatatatgtagtaaggggttaatatttaaaatatataagaaatttaaataatttaatagtaagaaaaaaaaatataattttaaaatgggtatagattagtttaatgttttttggattttatttaatgttatataatgttgttagaataaagagaaagatgaaaaaaataaataaaaatgggtaaaggatttgagtagatattttttaaaagaagatatataaatgggttaggcgtggtggtttatatttataattttagtattttggaaggtcgaggtgggtggattatgaagttaggagatggagattattttggttaatacggtgaaattttgtttttattaaaaatataaaaaagtagttgggcgtagtggtatacgtttgtagttttagtttttcgggaggttgaggtaggagaattgtttgaatttgggaggtagaggttgcggtgagtcgagatcgcgttattgtattttagtttgggtgatagagcgagattttattttaaaaaaagaggatatataaatggttaagaggtatattaaggagtgtttattattattaattattaaggaaatgtaaattaaatttataatgagatattattttatatttgttagaatggttatttttaaaaagataagagataagtgttgatgatagttgggtatgatggtttatgtttgtaattttaatattttgggaggttgaggtaggaggattttttgaatttaggagtttgagattagtttgggtaatatagggagattttgtttttaaaaaaataataataatatt

SEQ ID NO: 73 - DNA, 5675 bp, Artificial Sequence
  chemically treated genomic DNA (Homo sapiens)
gttattatgtttggttaattttttgtatttttagtagagattgggtttttttatgttagttaggttggtttcgaatttttgattttaggtgatttattcgttttagttttttaaagttttgggattataggtatgagttatcgtatttggttcgttttattatttttatatataatatatgtttttttggttgggcgtggtagtttaagtttggtggtagacgtttgtaattttagttatttgggaggttgaggtaggagaatcgtttggatttggaaggtagaggttgtagtgagttaagattgaattattttattttagtttgggtaatagagtgagaatttattttaaaaaatattgataataataagattatttttagaatttagtttttggtgtatgaagagatttaatatagtttttttatttttagtttttagaaagaagaatatgttagtttgattaatatggtgaaattttcgtttttaataaaaatataaaaattagttgggtgtggtggcgtacgtttgtgattttagttatttaggaggttgaggtaggagaatcgtttgaatttgggaggtggagattgtagtgagtttagtttgggagatagagtaagatttatttttaaaaaaaaaaaaagaagaagaatatgaaagagataggattaataattatttttattgtttaatagtttaagagtgaaagtttagtatagtggtttatttttgtaataattttagtattttgggaggttgagttgggaggattatttgagtttaggggttcgagaatagtttgggtaatatgttaaaagtttttttgtagaaaaaatataaaaattagtcgagtgtagtggtatatatttatagttttagttattagggaggttgaggtgggaggattatttgagtttgggaggttaaggttgtagtgagttatgattatgttattgtattttagtttgggagatagagttagattttgttttaggaagaagaaaaaaaaaaaaaaagttaaatttttttattttaggatgtttgaaaaggatagagtttatggagtatggatgtagaaaagtagttatttttattagaaaaaaaaaaaatgaaatgtggatatagttatttaagattagagatttaattagtgaaagtaattagttttaattttattgttattaggagggcgtatattagagaatttgggagaaagtttgttagagtttttagtatttttagtgttattggtgttgtggtttaataatttttgtgggaatgaggagaattagagattattattattatacgtaaaaaggattttatagtaataatgtggttgttaaaaattagttggaggttaggcgcggtggtttacgttgtaattttagtattttgggaggtcgaggcgggcggattatttgaggttaggagtttgagattagtttggttaatatggtgaaatttcgtttttattaaaaatgtaaaaaattagttgggtgtggtggtgtatgtttgtaattttagttatttgggaagttgaggcgggagaattatttgaatttgggaggtagaggttgtagtgagtttagattatgttattgtattttagtttgggtgatagattgagattttgttttaaaaaaaaaaaaaaaaattagttggagtttaaattatatattgtttgtaatttagattgtatttgtttttttgttaatggtttgagatatgtgtagaggttttttaaatatgtgtaggtgatttttttttgtcgtttaggttggatgtaggggtataattttagttaattgtaatttttatttttcgggtttaagtaattttttcgttgtagttttttgagtagttgggattataggtgtgtgttattaagtttggttgatttttttgtattttttttttttttttcgagatggagtttcgttttgtcgtttaggttggagtgtagtggcgtaattttagtttattgtaagttttgtttttcgggtttatattatttttttgttttagttttttaagtagttggtattataggcgttcgttattatgtttagttaatttttgtattttttttagtagagacggggttttatcgtgttagttaggatggtttcgattttttgatttcgtgattcgttcgtttcggttttttaaagtgttgggattataggcgtgagttattgtatttggtcgattttttgtatttttagtagagatagggttttggtatgttgtttaggttggtttggaattttcgattttaagggattcgtttgtttaggttttttaaagtgttaagattataggtgtgagttattacgtttggtttagaaatattttttttttttttttttgagatggagttttattttgttgtttagtttggatggagtgtagtggcgcgatttcggtttattgtaagtttcgttttttgggtttacgttatttttttgttttagtttttcgagtagttgggattataggtatttgttattatttttttttgtatttttagtagagacggggttaatttttttttgtatttttagtagagatggggttttatcgtgttaattaggatggtttcgatttttttatttcgtgatttgttcgttttagttttttaaagtgttaggattataggcgtgagttattatatttggtttagaaatatttttttattagaaatattattggcgggtgtagtagggtacgtttataattttagtattttgggaggtcgaggtaggtagattttttaagtttaggagtttaagattaatttgggtaatatggtgaaagtcgtttttatagaaaattagttaggtatagtggtgtgtatttgtggttttagtttttagggaggttgaggtgggaggattatttgaatttaggaggttgagattgtagttagttgagatttggtttttgtattttagtttaggcgatacggtgagattttgttttaaaaaataaaaaagaaatatgatttatttataaatattttttttttttttatttttagagatagggttttattattacgtaagtattataaattatatatatatgtttgtttgtttgtttgtttttttgagatagagttttgttttgttatttaggttggagtgtagcgttaaatttttatttattgtaattttcgttttttgggtttaagtgatttttttgttttagttttttgagtaattgggattataggtgttcgttataatgtttagttaattttttatatttttggtggagatggggttttattgtgttagttaggatggtttcgattttttgatttcgttatttatttattttagttttttaaagtgttgttaggattatagacgtgagttagtaagttcgatattttttttttttttttttttttttgtggaaatagggttttattgtgttttttaggttggagtgtaggggtataatttcgatttattgtagttttgattttttaggtttaagcgatttttttattttagttttttaaggagttgggattataggtattaggtttatgttattggtttttgttgtttataaatatattagatttgggttttagttgtttttttaatattaggtgggaaatggattgttcggaaggtagaggaatagaggagggatttgtttaggaaggtgggggtgttttagatgagagaggaggtgttgtgattttaaggtttggggaaagtgggtgagtgtagggttttattaaggtttttaataaggtttttttttttggagtttagatgtgaagtttagaaggtaggttagaggtttgaggttagaggtaggttaaaggtgggggttttatttggtttttttggcgtttttttttggaatgtagtgattagttgtttggaagggtgggtaaggggataataggatggggtaaaggttagttataagtagaattttggaaggtcgggcgtagtggtttacgtttgtaattttaatattttgggaggttaaggcgggtagtttatttgaggttagaagtttgagattagtttggttaatatggtgaaatttcgtttttattaaaaagtataaaaattagtcgggcgtggtggtatatgtttgtaattttagttattcgggaggttgaggtaggaaaatcgtttgaattcgggaggtagaggttgtagtgagtcgagatttcgttattgtattttagtttgggtgatagagtgagattttgttttaaaataaataaataaaaattaagtagaattttggatagatagtggtttagggatttagttgtttttaaattatttattttagttttttgtgtaggggatgggggatttttaagatttttaaagatagggaggtatttttaagatttttaaaggtggttaggcgtggtggtttacgtttgtaatcgtaatattttgggaggttaagatgagaggaggttattttaaggttaggagtttaagattagtcggggtaatatagtaagattttgtttttgtttttgtttttgtttttgttttttaatgttttttcgaaattttattttaatatttatataatggtgtttatagttttttttattaattttttttttggggatagaatatttttttatttatttaagtttagttagaaggagatgttttattttttttatttaggttttttagtgttgagaataaaagaaattagtttagttagtattttttgtgaatttaaatgggggttagtagtgtaattgggattagtttattttttgggggagatttagtagtgttggttattttgtagagtttcgtttgggttttttattttggtttttaagggttatagtatttttttttatttataggtttgggtaaggtgtagtttttagatttttgtaattttaatcgttgtgttttcgtcgtagtgggaggtttcgtttttttttttgtttgtttttcgggtattttaggaaggtatttttttttgttagaatggttattatggtattattcgtgttgtggtttagggtttgttggattttgttggtttgttgtttgttgattttaggtgagattagttaagtcggggagggttggagagggttgcgttttggggattagtagagggtagaggaatagaacgtaacgttgtttatattttgttatattgcgatttggtcgttgattttgtattttcgggagaaagttttggttttttagtttagtttttaggtggttaggttttagtataggtttgtacgttattttttttttttaatatatatatatatattttttatgttttttgttttatttgaatttttgaaatttgttttttgcgtatgtgtttttttttgttaggattatttgttttttttatttgttaatttttatttagtttttagtttcgggttgtaatggttttcgtttttaggaagttttttttgatttatttttttttatgttggattagagttttttttggtttttttttgagtttttttcggtttttgatggattttattttttttattggattatgaaggtaggaatttttttgtttcggtataaggagagaggtgttaaatggtggggtttgttgatgcgtgggttgggggataaggaaataaatattaggatttttttatgtttttgaagg

SEQ ID NO: 74 - DNA, 5675 bp, Artificial Sequence
  chemically treated genomic DNA (Homo sapiens)
tttttaggaatatgaagaagttttggtgtttgtttttttgttttttaatttacgtattaataggttttattatttaatatttttttttttgtgtcgagatagaagggtttttgtttttatggtttagtgggaaaggtagaatttattagagatcggggagaatttagaaggaggttagaagaggttttgatttagtataggaggaggtgagttagggaaggttttttggaagcggggattattgtagttcgaaattgaaggttaagtaggagttagtaagtgaaagggataggtgattttggtagagggaagtatatacgtaaagggtaaattttaggagtttagatggagtaggaagtatgaggggtgtgtgtgtgtgtgttaggggagagggatggcgtataagtttatgttggggtttgattatttgaaggttgaattaaggaattagaattttttttcgaggatatagagttagcggttaggtcgtagtgtggtaggatgtgaatagcgttgcgttttatttttttattttttattgatttttaaaacgtagttttttttagtttttttcggtttgattggttttatttggggttagtagatagtagattagtagagtttagtaggttttgggttataatacggatggtattatggtggttattttgatagaggaaggtgtttttttgaggtgttcgaagggtaggtaggggaaaaggcggggttttttattgcgacggaagtatagcggttaagattgtagaagtttggggattgtattttgtttaggtttgtgggtggaaggggatgttgtggtttttgggggttagggtgggggatttagacggggttttgtaaagtggttagtattgttgagttttttttagggaatgggttggttttagttgtattgttggtttttatttgaatttataggaaatgttaattaaattggttttttttgtttttagtattgggaagtttgggtgggggggatgaggtatttttttttggttgaatttaggtgggtaggggaatattttgtttttagagaggaagttaatggggaaaattgtaggtattattgtgtagatgttaaggtgggatttcgaggaaatattaaaaaataaaaataaaaatagaaatagaagtagagttttgttatgttgtttcgattggttttgaatttttggttttaagatggtttttttttattttgattttttaaagtgttgcgattataggcgtgagttattacgtttggttatttttgaagattttgaggatatttttttatttttgaagattttggggattttttattttttgtataaagagttaaggtaggtgatttggggatagttgagtttttgagttattgtttatttaggattttatttggtttttgtttgtttgttttgagatagagttttattttgttatttaggttggagtgtagtggcgggatttcggtttattgtagtttttgtttttcgggtttaaacgatttttttgttttagtttttcgagtagttgggattataggtatgtgttattacgttcggttaatttttgtattttttggtagagacggggttttattatgttggttaagttggttttaaatttttgattttaagtgagttgttcgttttggttttttaaagtgttgggattataggcgtgagttattgcgttcggttttttaggattttatttgtaattggtttttattttattttgttgtttttttgtttatttttttaggtagttggttattgtattttaagggaaggcgttaaggggattaggtgggatttttatttttgatttgtttttgattttaggtttttgatttgttttttgggttttatatttgagttttagagagagaggttttgttgagagttttgatggggttttgtatttatttattttttttagattttgaggttatagtatttttttttttatttagagtatttttatttttttaagtaggttttttttttatttttttatttttcgaataatttattttttatttggtgttgagagagtagttaaaatttaagtttagtgtatttgtaaatagtagggattagtagtatgggtttggtgtttgtagttttagttttttggaaggttgaggtgagaggatcgtttgagtttgggaggttaaagttgtagtgagtcgagattgtgtttttgtattttagtttgggagatatagtgagattttgtttttataaaaaaaaaaaaaaaaaaaaaagatgtcggatttattggtttacgtttgtaattttagtagtattttgggaggttgaggtaggtggatgacgaggttaggaaatcgagattattttggttaatatagtgaaattttatttttattaaaaatataaaaaattagttgggtattgtggcgggtatttgtagttttagttatttaggaggttgaggtaggagaattatttgaatttaagaggcggaggttgtagtgagtggagatttggcgttgtattttagtttgggtgatagagtaagattttgttttagaaaaataaataaataaataaatatatatatataatttataatatttacgtaatagtgagattttgtttttaaaaataaaaaagaaagaaatatttgtaaataagttatattttttttttgttttttgaaatagagttttatcgtgtcgtttaggttggagtgtaggggttaaattttagttaattgtaattttagttttttgggtttaagtgatttttttattttagtttttttaggagttgagattataggtatatattattgtgtttggttaattttttgtagagacggtttttattatattgtttaggttggttttgaatttttaagtttaagggatttgtttgtttcgattttttaaagtgttgggattataggcgtgttttgttatattcgttagtaatatttttgataaagaagtatttttgggttaggtgtggtagtttacgtttgtaattttagtattttgggaggttgaggcgggtagattacgaggtaaggagatcgagattattttggttaatacggtgaaattttatttttattaaaaatataaaaaaaaattagtttcgtttttattaaaaatataaaaaaaaatggtggtaggtgtttgtagttttagttattcgggaggttgaggtaggagaatggcgtgaatttagaaggcggagtttgtagtgagtcgagatcgcgttattgtattttatttaggttgggtaatagagtgagattttattttaaaaaaaaaaaaaaagagtatttttgggttaggcgtggtggtttatatttgtaattttaatattttgggaggtttagataggcggattttttgaggtcgggagttttagattagtttgggtagtatgttaaaattttgtttttattaaaaatataaaaaatcggttaggtgtagtggtttacgtttgtaattttagtattttgggaggtcgaggcgggcggattacgaggttaggagatcgagattattttggttaatacggtgaaatttcgtttttattaaaaaaaatataaaaattagttgggtatggtggcgggcgtttgtagtattagttatttgggaggttgaggtaggagaatagtgtgaattcgggaggtagagtttgtagtgagttgagattgcgttattgtattttagtttgggcgatagagcgagattttatttcgaaaaaaaaaaaaaaagtataaaaaaattagttaagtttgatggtatatatttgtagttttagttatttaggaggttgtagcgggaggattgtttgagttcgggaagtggaggttgtagttagttgagattgtgtttttgtatttagtttgggcgatagagaaaggttatttatatatgtttaaggggtttttgtatatattttaagttattgataagaaagtaagtatagtttggattgtaaataatgtataatttaagttttagttgatttttttttttttttttgagatagggttttagtttgttatttaggttggagtgtagtggtatagtttgggtttattgtaatttttgttttttaggtttaagtgattttttcgttttaattttttaagtagttgggattataggtatgtattattatatttagttaattttttgtatttttagtagagacggggttttattatgttgattaggttagttttaaatttttgattttaggtgattcgttcgtttcggttttttaaagtgttaggattatagcgtgagttatcgcgtttggtttttagttgatttttgatagttatattgttgttataggattttttttacgtgtgatggtgatggtttttggttttttttatttttataaaggttgttgaattatagtattagtaatattgagaatgttaagggttttagtaggtttttttttaggttttttggtgtgcgtttttttggtgataatgaaattgaagttaattgtttttattggttgagtttttgattttgagtggttgtgtttatattttattttttttttttttggtaggaataattatttttttgtatttatgttttatagattttgttttttttagatattttgggataaaaagatttggtttttttttttttttttttttttttgagatagggtttggttttgttttttaggttggaatgtagtgatataattatggtttattgtaattttgattttttaggtttaggtgatttttttattttagtttttttagtagttgggattataggtgtgtgttattatattcggttaatttttgtattttttttatagaggagtttttgatatattgtttaggttgttttcgaatttttgggtttaagtgatttttttaatttaattttttaaagtgttgggattattataggggtgagttattgtgttgggtttttatttttaggttattaaataatgaaggtagttattgattttattttttttatattttttttttttttttttttttgagaatgagttttgttttgttttttaggttgggtttattgtaatttttattttttaggtttaagcgatttttttgttttagttttttgagtagttgggattataggcgtgcgttattatatttagttaatttttgtatttttattagagacgggggttttattatgttggttaggttggtatatttttttttttaagaattgagagtgagggggttgtattgaatttttttatgtattaggaattgagttttgaagatgattttattattattagtattttttgagatgggtttttattttgttgtttaggttggagtgaggtggtttagttttggtttattgtaatttttgttttttaggtttaagcgatttttttgttttagttttttaagtagttgggattataggcgtttgttattaggtttgagttattacgtttagttaaaagagtatatattatgtatagaaataataagacgagttaggtgcggtggtttatgtttataattttaggattttgggaggttgaagcggatggattatttgaggttaggagttcgagattagtttgattaatatgaggaaatttagtttttattaaaaatataaaaaattagttagatatggtggt

SEQ ID NO: 75 - DNA, 6106 bp, Artificial Sequence
  chemically treated genomic DNA (Homo sapiens)
tttattgagtattaattttgtgttaggttttattttaggaattgtgagtgaaagaagttaatgagatatgttaatttggaagtttttaagattttttagaagagagatagatatgttttaaacgtagtttagtataaggattagaaatttgtttaaattagttttagagaaaaagagaaattattattaggttggtttaaaaataattgtgggttttgttattgaaagtaatagaatgatatatagatattttatggatgtaaatttaggaagaatagttagattttatataatggtaaataaaattaaaagatttagaataattttttttcgtgtttttttttttttttgtttgtttgttttatgtatgtatattttagttttttggttttttatatttgtttttgtttttgataaatggtgtagatggttttttttatatttattgaagaaaatgaatgggttgggtataattttaatattttgggaaggtggggtaggaggattgtttgaggttaagagttttagattagttttggtaatatagtgagattttatttttataaaaagaaaaattaaaaaattagataggtgtggtggtgtatgtttgtttagttattcgggaggttgaggtagtaggattatttgagtttaggagtttgaggttgaaacgaattatgaatattattgtattttagtttaggtagtataaagttttattttaaaaaaaaaaaaaaaaaaaaaaaggcgggggggaaaaaagaaagaaaatggttgtataaagtgaatataaatttttattttatgtgattagtaaagattttagaatttgtatattatgaatgtaaatttttaggagattgatcgagtttggttaggtgtttggtttagcgataaggaggtaggattatgtgatttagtgatttttagaaggggattatggaagattttgagaaagttttattggtagagttggtaaatagttttgtatgtttgttataagtatgaaaataagtaaggttagttaatcgtagttgtgttagaatcgaaatatgaatatgatttattagtgtattgatgggtttaggaagttaggaaatttagaattattttatttgttttgtttgtgtttaagttaggagtgttttttttattttggttattatgtattttagttagtgtttagagatttgtgtgtgagttaagtttaatggattttaagttttatttatttattttatggatttattgagtaatatttgagaagttattggttattttattttaaaattattaggatttatttagaagtttatatttattattttttttaggtttagggagaagaatgtggaattgttaggaaatttattttaatgtattataataattattaatatttattagaaatttatttattaggtataggattagatttttataataaaaatgtataagattttagagatttagtatttaaatgagaaggtagaatatatatatataatttaataatatattattttgtaatatatataaaagaaagtttatttgggggaaaaaataaaaataaaaaaaaaaagttagaggaaattagagttaagaaagaagaatgattagtttttagtgaagaaaatgggaaaggttgggttaataatatagaatttgattggagttttgaagtagaatttgaaataatggaagaaaaaaagaaagttattttaagtagaaaaataaggaattgataatgaagaatgggaaaggtaggttagtgaattcgtgaatttggtttaaatatagtgtgtaagagggaaagatagttacggagtttatagaggtgagttggagttaaatcgtgattttaaattttagggtattttgaatgttttgaagatatttaatgatttttagtagattagttttgtatttttggatattgtgataataggtataaagatgaattggaataggagagaaggaagtatagagagattatatgggagtttgttattatggtgaaagattaaaagggtttgaattaaagagagattagtagtggaatagaaaataggagatggtatagaaaattttagtagggtgtaaagatagaattggaatgggatgttagtagggggttggtggtgtatttggggaagaaagtagaggtttttggtttgggtgattgtttatatgaaaacgggataaataaaggagggtagggtatgacgatataatagattagaaggaaatattggggaaatttatttgagtcgtgttttttaataaaattttgttttgagttaaggaaaagaaaaagaggggaaggttttattttatttttgagtgttttttggagtagggtttttgggttttttaagatttttttaagtggttagtgaagttaaaattatttttataataatattgagacgttattgcgttttttattgtgttgatatttgtttttatggtgtaagaataaggatggggattggtggttattgtattttttattattgggtatttataggaagagaaagggagagggatacggagaggttagtagattaatgaattttaatgttacggaataggaaataattattgatatggttttagattttatattgtaattttaagaaattattatttgttgagttttggtgtagtattaggggattatttagaattattttttgtttttttaagtttatatttgtgtaatattagattaattaatataattttattaaaattatatgtcgtaatagattggatgtagaagtagatttgagaatttaaatgtttgtttttaagttagatatttaaaatattagtaaaaatgtaaagtaatgttatttttttttcggatttttttatttggagaaatatagttattttttataaaatgtatattatttatgtttatatataataggatttttgttaaaggatttattgagtaaagggtttttgagattaaagagtttgagaagttttagtttaattttttatattttttgttttgaatgtggtgttttttataattgtaattaggtaggagagtattttggaaggggtttttaaattattttgttttaggaatattttatttttttaaaattaatgtgaggtaggagtttgttttttgtttttaaaagttttgtttggttttggaaaatcgtagtttttgatttattttgtattttatgatagtgtaatgttaatttgtttagttttgagaataaaaattaagaaggatgtatgttatttttttttattttagagataaaatataaatttttgttttatattaaaggaagtgttttgttttttaaatataggtttgttttaaatatttatttatattttagtgagttagaaggaaatagatagatatttatttttttgaaatttggttgattttttttaaaaagtttgtaaggagcgttaaaatcgtgttatcggttagtgagtagttatttaagagtttttaggtgatagtcggagttttagtaagtaggtgagtattttagataatttagaaaaaaatgtttttaggtgtttgttaaggtgagtaagtgtagttagtaagtgattgataagaaaataggaaagagtttgggattatataatttgggtttaaagggtattagttataagttattagtagtaatatttgatgtatattaatttaatattttaataatgtgatatattagttttatttatagtaaagagaagagtttgatttttatgaattattaagttttttttattttgagttattttgttttttagaggtagtattttaggtattttatttagtttatagtagtattttatgaagatttggaatgatgataataatgatgattattagatttataattttttaagtttgatttatgaaaatagttcgtttttttataaaagtagttattggaagaattttggttttagtaatgtgttggaaatttgtggttaaatttttggataaaatataagatttagataagaaaaattaatattttattttttaggtttttaattaaaaatttcggatatagaatgttttttttttagatgtgagattgaaataatggaagaaaatggttatagtttatgttatggtgtaatgtagatagggagagttataagtgtatgtatgggtttttagttttttttttggttttgaagttaattttttaaatttagttattaaattagtttttaattatttcggaggagaggaagtaatgatgatttttttttttttgtttttttgttatatatatatatatatatatagtttttgtagtaggtattgtttaaatattattttggataattataatttgtgagtagatttttttttttgatgagttagtttttaatttggttattttgcgtttatttttgtttttttttttatttatttaggaaaaatagagaaagggacgtatcgcgtagtttttaggtattgtggtttagggttagtgttttcggtattcgttgttaggagtcgggcgttgttaagggttgcggaggggttacgttttttcggggattggggtattttttgcgtgttggcgataggttgcgggggcggagtggtgttagggcgggcgttcgttcgtcggatatgtttattcgtttcgtttagggtaggaaagtttgttagggcgttatttttatttttatcgtttttaggttgtcggggttgggtcgttgtacgggagttaaggtgcggtgtttcgcgtgtggacgagtcgaggtgtagttcgcggggtcgtagggtcggggtggggcggggcgcggtcggagtagattcggtgtttgcggaattaggaggggcgggttggggcgggttttcggcgttgtaggagttgtttagaaatttttttttgtttttatcgggcgggggagagaagttttttgatagtttttagagtgtgtaggttttcgtattttcggttaagggaattttttgtaaatttttgtaaatttagcgtaattacggtttttcggttagatttaggatggggttagaacggataggggtcgcgtcgttgtcgttgttgttggtgttagcgtttagttaaggtaagcggggatttcgttttgtatcggttgtaggagggattcgcgcggttttttggggttcgttggagggattgggcggaattagggagcgagtttcgtgtgttttttcggattttacgtggattcgggtttttagttattaggatttgtttggaaagagatattttttcgttttttttttgttattttaggttttgcgtttttattaggcgcgtttcgttttgtttgttaagtattttttaaagttattttagtgagtgttttgttttaggtatatatacgtatatatatatatatatatatagatagatacgtacgtatttaagtatggatagtgtggggattcgcgggtgttttggagatcgcgagttttgtagtttaattttttttggtttagataggtgtcgcgtttgttagagattagggaaattcggaatttattgttgatggcggtttgtagttttttagcgcggtgtttgttggttttgtagaagtttgcgagttttaaaatgtttattttttaatttaaggatgtgaataatgtttttattttttatttgaggacgaagcgttgtgttttttttcggggggatttggaataaattaagcgttatttaaatatttggtagaggggaattttttttttttttttgttttttttttattgttgtaatattgtttattcgacgaatgtaaatttaggttaggaaaagttttttttatttttggattttagatgtcgtaatgagagaataagtcggagtagtcgttttaattgtagtgttgtggtagtggggttcgtttattttttgagtttttttatattaagaggaggaaataaggttggggtggagagtttttgtgggattatcgtttgagtattttttttttgattattaggtagagttagagtgtggttaaatttaagaattttagtttatttggagggagaaggagatacgtttgtataatgtagtttgaatagcgattaaaataaaat

SEQ ID NO: 76 - DNA, 6106 bp, Artificial Sequence
  chemically treated genomic DNA (Homo sapiens)
gttttgttttgatcgttgtttaaattatattatataaacgtgtttttttttttttttaaataaattaaaatttttaaatttgattatattttagttttgtttaatggttagggaaaaagtatttaggcgatggttttataaaagttttttattttagttttattttttttttttagtgtaaaagaatttaggaggtgggcgggttttattgttatagtattatagttagagcggttgtttcggtttatttttttattgcggtatttaggatttagaagtgaaaagaattttttttagtttaagtttatattcgtcgaatagataatgttataataataagaggaaggtagaagggaaggaagaatttttttttgttaagtatttaagtggcgtttggtttattttaagttttttcgggaagaaatatagcgtttcgtttttaagtaagaaatagaggtattatttatatttttgggttgaaaaataagtattttggggttcgtaggtttttgtaaagttagtaagtatcgcgttggggagttgtaggtcgttattagtaatggatttcggatttttttggtttttggtaggcgcggtatttgtttgagttaggggaagttgggttgtaggattcgcggtttttaggatattcgcggatttttatattgtttatgtttgagtgcgtgcgtgtttgtttgtgtgtgtgtgtgtgtgtgtgcgtgtgtgtatttaaaataaagtatttattgagatgattttggagggtgtttaatagatagggcgagacgcgtttaatggggacgtaaggtttgggatagtaggaagggaacgaagaagtatttttttttaagtaggttttggtggttgggagttcgagtttacgtggaattcgagggaatatacggagttcgttttttagtttcgtttaatttttttagcgagttttaggaagtcgcgcgggttttttttgtagtcgatgtagagcgaaattttcgtttattttgattgagcgttaatattagtagtagcggtagcggcgcggtttttgttcgttttggttttattttgggtttgatcgggggatcgtagttgcgttgggtttgtagaggtttgtagaggatttttttggtcgaggatacgagaatttgtatattttagaagttgttagagggtttttttttttcgttcggtgagagtagggaaaagtttttgggtagtttttgtagcgtcgagggttcgttttagttcgttttttttgatttcgtaaatatcggatttgtttcggtcgcgtttcgttttatttcggttttgcggtttcgcgggttgtatttcggttcgtttatacgcggggtatcgtattttggttttcgtatagcggtttagtttcggtagtttggaggcggtggggatggggatggcgttttggtaggtttttttgttttggacgggacgggtgggtatattcgacgggcgagcgttcgttttggtattatttcgttttcgtagtttgtcgttagtacgtaggagatgttttagttttcgggagaacgtggttttttcgtagtttttggtagcgttcggtttttggtagcgggtgtcgagggtattagttttaaattatagtgtttaggggttgcgcggtgcgtttttttttttgttttttttaagtgggtggagaaagggataaaaataagcgtagaatgattaggttagaaattaatttattaggaaagaagatttgtttataagttatgattatttaaggtgatatttaagtaatatttgttgtaagagttgtgtgtgtgtgtgtgtgtgtgatagagagatagagagagagaaattattattattttttttttttcgagataattaagagttgatttaatgattgagtttaggagattaattttaaggttagagaaaaggttgagagtttatatatgtatttgtgattttttttgtttatattatattatgatatagattgtgattatttttttttattattttagttttatatttggaaagagaatattttatattcgagatttttagttaaaaatttaagaaataggatattaattttttttgtttgaattttatgttttatttaaaagtttggttataaatttttagtatattgttgaaattagaatttttttagtgattatttttgtgaaggaacgaattgtttttataaattaagtttaaggagttatgagtttaataattattattattgttattattttagatttttatggaatgttattatgagttgaatgggatgtttgagatattgtttttaggaagtaaagtggtttaaggtgggaaggatttaataatttataaaaattaagtttttttttttattatagatagggttgatgtgttatattgttaaagtattaaattggtatgtattagatgttgttgttgatggtttatgattaatattttttgaatttaaattatatagttttaggtttttttttgtttttttattagttatttattggttgtatttatttattttgataaatatttgaaggtatttttttttgaattgtttggggtatttatttgtttattaaaatttcggttattatttgagagtttttaggtggttgtttattaatcggtgatacgattttgacgttttttatagattttttgaaggaagttagttaggttttagggagatgaatatttgtttgtttttttttgatttattgaaatgtgagtaagtgtttggaatagatttgtgtttgggaggtaggatattttttttaatgtgagataggaatttgtgttttatttttggggtggggggaaataatatgtattttttttggtttttgtttttagaattggataaattaatattatattgttatgaagtgtagaataagttaggagttacgattttttagagttaggtaaaatttttagaaataaagaataaatttttgttttatattaattttaagaggataaagtgtttttgagataaagtagtttgagaattttttttagggtgtttttttgtttagttgtagttgtgagggatattatatttagagtaggaaatatggaaggttaagttggggttttttaaattttttggttttaagagttttttatttagtaagttttttaataaaaattttattatgtgtgaatataaataatgtatattttatgaaaaataattatatttttttaaatgaaagaattcgggagaagagtggtattgttttatatttttgttaatattttaaatatttggtttaaaaatagatatttggatttttagatttgtttttgtatttaatttgttacggtatgtagttttggtgaaattatattgattaatttggtgttatatagatatggatttagaaaaataggagataattttggataattttttgatattatattaaaatttaataagtggtagttttttaaagttgtaatgtggaatttgaaattatattaatggttattttttatttcgtggtattaaaatttattgatttgttggttttttcgtgtttttttttttttttttttttgtgagtgtttagtgatgaagaatataatgattattagtttttatttttgtttttgtattatgagggtaaatgttaatatagtgaaaaacgtagtaacgttttagtattgttatgaaaatagttttgattttattggttatttgaaaggattttgagagatttagagattttattttaaaaagtatttaggggtgaagtgaggttttttttttttttttttttttttagtttaagatagagttttgttggggaatacggtttagataagtttttttagtgtttttttttgatttgttgtatcgttatgttttgtttttttttgtttatttcgtttttatatagataattatttaaattagaaatttttgtttttttttttaggtgtattattagttttttgttaatattttattttaattttgtttttatattttattagggttttttgtgttattttttattttttgttttattgttaatttttttttggtttaaatttttttgattttttattatggtgataaatttttatataatttttttgtgttttttttttttttgttttagtttatttttatatttgttgttatagtatttaaaaatgtaggattgatttgttgaaaattattagatgtttttaggatatttaaagtattttagggtttaaggttacgatttggttttaatttatttttgtgggtttcgtggttattttttttttttgtatattatgtttaggttaaatttacgagtttattggtttgttttttttattttttattgttaattttttatttttttatttagaatagtttttttttttttttttattgttttaaattttattttaaggttttagttaaattttatattattagtttagttttttttattttttttattgagaattaattattttttttttttggttttggttttttttagttttttttttttgtttttgtttttttttttaaataaatttttttttgtatgtattatagagtaatatattattgagttatatgtgtatattttatttttttatttaaatgttgggtttttgaaattttatatatttttgttataagagtttagttttatatttagtaaataaatttttaataaatattaatagttattataatatattgaaatgagttttttaataattttatatttttttttttagatttgaaaagggtggtaaatatgaatttttaggtaagttttagtaattttgaagtgaagtaattagtggttttttaaatgttatttagtgaatttatgggatgagtgagtaaagtttagaatttattgagtttgatttatatataagtttttaagtattggttggggtgtataatggttaaaataaaagagatatttttaatttaaatataaataaaataaataaaataattttagattttttagttttttggatttattaatatattgatgaattatatttatatttcgattttagtataattacggttgattggttttatttgtttttatgtttgtggtagatatgtaaagttatttgttagttttgttaatagggtttttttagagttttttatgatttttttttagaagttattgagttatataattttgtttttttgtcgttaagttaaatatttgattaagttcgattaattttttagggatttatatttatggtatatagattttagaatttttgttgattatatgaaatggaaatttgtgtttattttgtataattatttttttttttttttttttttcgtttttttttttttttttttttttttgagatggggttttgtgttgtttaggttagagtgtagtggtatttatagttcgttttagttttaaatttttgggtttaagtgattttgttattttagtttttcgagtagttgggtaggtatgtattattatatttgtttaattttttaatttttttttttatagagatggggttttattgtgttgttaaggttggtttggaatttttggttttaagtaatttttttgttttatttttttaaagtgttggaattatgtttagtttatttattttttttaatgagtgtagaaaaagttatttgtattatttattaaaaatagagatagatatgagagattaagaaattgaggtgtgtatgtatgagatagatagatagagaaagagagagatacggagagagattgttttaggttttttaattttgtttgttattgtgtgagatttgattgttttttttgggtttatatttatgaaatatttgtgtattattttattatttttagtggtaaaatttataattatttttggattaatttaataatagtttttttttttttttgaagttaatttgagtaggtttttagtttttgtattagattacgtttaagatatatttgttttttttttgggaaattttaaggatttttaagttaatatgttttattaattttttttatttatagtttttaaaatagagtttgatatagagttgatgtttaatgaa

SEQ ID NO: 77 - DNA, 12711 bp, Artificial Sequence
  chemically treated genomic DNA (Homo sapiens)
agagggatggtaggtagggaagttttcggatgtttggggtttatttattacgtttttatagagattattgtttattaatttttagaaagtttttgtatttttttttttttatttttagtatttttttcgttttatatttgtttttgaagttttagttaaattagtattttgggttttttttatttatttttttttttttttttttagttttgtttttgtttagtttattttttggttaaattattatagtagttgtttttttttataatttagtttgttttggtaaagttaattttatgtggtagttagaatgttttgatagttttttttgttttataagtattatttttaatatataatgtaaagtgggtttagtttgtttaaatgtgagagtaattagaatatgaggttatattttggttttttttaagttattttcgggttgggatttagtttaggattggtatatagtaggttgttaatgaatgtttgagtttggtagattttgagttaggggaatcgtttggattaggtttgtatttgggttataggagaaggaaatttgataaatttatttaatttttagtatttttttttttttttttttttagtaatttgtatttttaatttaagttagatagatttttgagttttagtttaatagttgagatttggtatatttcgttgaatagatattagaaggtttgggatataatgaatgtagattggggaatagtgagagatttttttttagtttttttattttatatatggagaaatcgaggtttggaacggaaggtaatttgtttaaggtgagaaggtagaagagagtttgtatttaacggaggggtatattattgtaattttttgttatttttttagtagttgtttgtgtgttttacgtttttgtgttgatttgttcgagaggtgatggtgtttattggtgtgttttggggttttgggagagtgagatgagggttggggagagggtaggtagaggaagatttgtgggaatatagtaagcgttaaataaatagaagtcgtttttgtgggatattgatattgttattgttttagttgggaaaattttatttgaattaggatttaatttttttgttttttttttttagtttttttttttttttgttgtttagatatattttttttagggagtttttatgattttttagtagaatttattatttgtatgttgttacggttatttgtagaggtagatggattttatttaaggtttggtttgaatgaagattgacgatattatttaaatattaagagagtatgaaaaggtttattatttatataattgaggtttttagggggagtagggttagttttttaagtaggttttagatgtgttgggagagttaggaaggagattggtttgggtttttattgtggttgaggggtgagggtttttttaggaaggggtttgtgaatatttttttttaaatattaaaggagggtgtatttagatttttttattagtttgtttaggtgtagggtatagagaagagggaagggtgaggtttaaaatttgttagtaaatattaataaatggatttagattttttattatatatattatttttgtgtttttgtttttttgtttgtttgtgtgtttttaggtgggttttttttttatgggggagggttgatagataaagagttgatatgataaagttaattgagggatgagatgattttatagacgacggtgttattgaaattaaagaattttgagatttttttttttttatttttttagttgagatttttttagtttttatgtttttttttatttttattttatttttttagattggtttgatatttttttatattttttagtttaggttttttttttattagtcgtttttgttttgttttatattttttttggatatttttttggagtggaaaaattattttttattttttttcggtttttagttttaggatcggatatgttggttatttttgtttgggatgtttaaagagataaggtttggtatggggttaatttgttatcgtaggatttttaaagttgttttaggtaggatttttatttatatggcgtttttattttaagtttttgttttttttattttggttggttttttttttttaggaatatggtagaggatttaggagttaggtagagagtaaagattattgtttaatttttatttaggttagttttttgttttttgattttatatgttttttaatttttgtaggttttgggttataaagtagattatgagagaggttgggtggttttggaagttagaggttaggaataaattttgttttaagggtcgttagagataagtgttttttttttaaatattatagagaaagttgttattatagttgtttttgtttaggtatgtttagttgtttgataattatttgtttggagtttgtttttttaaagatacggttgtggttagcggttttagttttagttttgttttttataaaatttagattttggataggtaggtaattttttgaggttttgtttttttttaagttaaatgaatattataatttttattttatagggaggttaggaggataaaatgagtttgtttgtgaaatgatttgtaaattgtaaagttaggttaggatttttttttaggttttgaatttaattttgtatttataatttttatgagtataaaataattttatttttaaagagtattttagattgtataagttttaggatttattaaatttggatacgtttaaagtagtgtataaatgtttattattagtataagtagttaagggttttagggttagataatataggatgaaaattttagttgtgtgatttttgttaaattgtttaatttttttgagttttatttttttcgttttaaaatagagataatattttaaagattgttgtgaggatttaatatttgtgaagtatttagtatagtttttgttgcgtatgtgtttaatatatggtgttttgtttttattattttaagaatagatggagaaaagaatgttcggggaggttaggtagggtggtttacgtttgtaattttagtattttgggaggcggcggggtggattacgaggttaggagttcgagattagtttgattaatacggcgaaatttcgtttttattaaaaatataaaaattagtcgggtatggtggtgggcgtttgtaattttagttatttaggaggttgaggtaggagaatcgtttgaatttcggaggtagaggttgtagtgagcggagatcgcgttattgtattttagtttgggagatagagcgagatttcgtcgttttaaaaataaaataaaataaaataaaaaaataatgtttcggggaaaatgggtttttgagttgtaataagagaaatgtgagttagatttaagaaagtatatagtaattttttttttttttttgagacgacgttttattttgttatttaggttggagtgtagtggcgcgatttcggtttattgtaatttgcgtttttcgggtttaagcgatttttttgttttagttttttaaatagttggaattataggcgttcgttattacgatcggttaatttttgtatttttttagtagagatagggtttttttatattggttaggttggtttcgaatttttgatttcgtgattcgtttttttcgggtttttaaagtgttgggattataggcgtgaattattgcgtttggttagagtaattttttgaagttttttttcgatttgattttttggtggaggagatttttagttttcgtttatttattgttatttggttttatttattaaatatttgatgggtgttgacgttcgagtttagtttttaaatattttgttcgagtttgggtgggaagagggagtttttgggattttgttgggttgggttttgaaggtaggagtggacgagaaatggatacggtttaggtttagtttttcggttacgtagtgcgttttgtgaaggacggatttatttttatattgatagttttagtttttgatattagaagtcgtagtatttagggggaaaaatgttttttggtaattataattagcgatatttggttgttattattgttaaatatgtttgtttttgttgaggagttaattttagttcggattagggtgagtggataggagaaataaatttcggtaaagatagcgaggggtttgagtgcgaggaagaatttttagagatcgttagttattttttggggatttatagcgttgcggaggcgagtttagtattttagttagtcgcgtacggacgtcggtttttagatgcgttaatgttaggtttttttagttcggttggtttttttagtagtagtagtagtagtcgtaggaaagcggttagataaattttattttcggtttcgttcgttatatttattttgttttttaggcgacgttttttcggagaagcgaggggcggggaggggaaatttaagtttttgggggttgtcgataggtgtttgggggagaaggcggagttggggtagggaggatgaggagggaggggcggtgttgtttttttaagaggaggcggtcgagtcgggattttttttttttttttcggaaggaaagcgtagttcgggttgggttcgtaaggtggggaggtgcgggattgggcgtggggaggcggggcgcgcgtcgggggattttttttttttgttttttttgcggtcgatcggtgcgtttgttagattcgtcgcgaagtcgggatcgaaggcgatagcgcggttaagggggcgcggtcgggataagttgggggtcggttgttcggggtagggacggcggcgattcggtcgttggggaggtaggaagatagatttacggattttaggaagggattcgagagcgtagttgtgaaattggttggggttgggggtacgaaatcgattagcgttacggagcgtagcggtcggcgggttttagtgtttttcggcggcgcggggagtaggtgaataggtttttacgtttagtttcgcgtttttacgcgttttcgtcgggatttcgttttcgttggtagttatgggtttcggttttagtcgcgcgtttcgcgttttacgtttgatgttttgtgcgttcgttttgatggtggcggtcggcggttgcgtcgttttcgtttttaatttggatattcgatttttggtagtgaaggaggtcgggaattcgggtagttttttcggttattcggtcgttttttatcggtagatagagcggtagtagcgttatttgtaagtgaagttggagggtgtggggtgggagcgagagagtgtgcgagcgcgggatgcgggttcggagttgagtcggagtttagggtagttggtttttgggagttaggattaaggggcggttttttggttgttgggggttggcgggaagtggaggattgggtgtggggtcgggtagtaattattggtaagtgttgacggggttagaatttgtttggacgttattttttcgttttttagattttttatgagagcggaagtggggtttcggtggttgagtttttttttattttgtgaatcgagtatttagtattagtttgttttttttagggttgggagttggggtaaattgtaagataaatatttagcggattttttttttttcgtacgtttgggggaaaaatgagtatatatatttaagtatttcgttggtagtttgcggttacgttagttatattttttgtagagttagattggatggtttttttaatcgttggtttggcggatggagggtgaggcgatgggtgagtttgggcgtttggagttgtttatacgttttttttgacgttttgaggataggggcggtgaaagagagaggaggatttgttttaattttggttgggtttttttttgtttattcgtaagtagtggtatttttttcgtagatattttttttgtattttatagattcgtgttggatttttaattttgagtgtgtttgttttggtttgaagagggaaatagtgttttttttttttttttgttttttttttttaatagttgtaaggaggaggggaagagttatgtatagtggaggaaggaggaggaggttgtatttagttttttgggttttttttattttattagacgtttttatgtttaggagtatgtttaggttttagaggtttttttgtcgtggttttagagcgcgcggaggttggcggttgggggaggtgaagttgtttaaagagggacggtgtttaggataggttaagtaggtattatttattattttgggttgggcgatttgttaggtatttgtttttatttagtttttgtttttatttggtttttgattttattgaataagaagacgtggttatatttagggtatattggaaaatttttttgttttggttggggtttgtagagtttgaggaagtttagaatgtttaaagtttaaattttgttttcgttttggttttgtttttttgatttagtttatttatttggatttaattttaattttattttgtttttgtagaggttagggttattatattttttttagtttggttttagtagttgttatttggttttagttaattttttattttttggagattttgagttattatgagtataagtttttatattagttttttttgttttaattgagaaaaagatttttagatttttaatgttaaatttgtatgatataagataatataggtaaagagattagattggaaagaaagagttaataatgatttcgtaatttttttgtttggtgattttgagtaagatattttttttttttgggttaggttttttttaaaaggggttggatttggatttagtgtttttttttattgttgttggtttgtgagaagtaatttgatatggtagagggagaagaggtttggaggttttatggttagtgttttgttttagatttgttattaatatttgaatttgaattttcgtatatgttggagggaggggaatagtatgttttttgttgggatgttagtggggttgtaacgagataaagtgcgtaaaattttttgtatatgtgtttttttttaaggagtatttgaaggtttttgcgttgaggttagaatttggatgtatttttattatttatgggtttcgtttagggtggttgagtaaaggggttttatttttttgtttgggaagttggagttggtatttagtttgttaagagtttagaaggttttaaagttaatgaatttttgaggggtagtttttttttttgagtatttttagttttttttaagggtggttttgtgttttggtttttttttttattttattaaattcgatttttcggttatttgggagagttagttgggtttagttgtagttagttgtgtagttagatgtaaatagttgtttgagtgtataatttagaggaattaattagtaagacgagttgtagttttatattttgttagtttgaaagtttttttggaaaagtgggatggttcgtggttttggataggtttttaaattggggttcgtagaaggtttttaagagatgtagggattttttgaaagtgtatttaaaatcgtagtatttgtttattgttttgggggtgggaggaggggagagtatagtttttttgttttttatttataaggttttagaaatggttagaaatttaggggtgggattttttttgttgttttattatttttatttttggattggggtttttggtttataatatagggggttagttttaatttagggtttagttttttagtttgtggaaatgaggggtaaggagtaggtagaggattaaagtgttttgggttttttggtaagatgtatgaggggttttttggagggatagggattgttttttgggaggtggttattgatattttttttgttttagtatttgtattgatatttttttttgggaatttaggtattttggtttggtttgattttgtgggtttatggggatattgtcggttttttttttttttttatttttgtttggaaatgagggtatttgggaagtttagggtagggtggtttttagaaatgaggttatgtttgaggtacgtaggagttaggtttatttgttatgtttttttaatattatgtttttttgggtaaagtaggtgtttggtagtttttaaggttcgtgttagtagaaatgggtatagtagttgtggttggaggtagaaggtttgttcgtgtagtattttttttttttggttttatttagtgattagtttaggttaagaggtttttaattgggtaggagtaggggaagtttgattttgtagaaaaagtagtagcgaagggggtttggttagaagtaaataaagaaggaagaagattttttttgtagtaagaggaattgaggttagatgatatttagaatgttttcgggggttaaatataggaaaaatattgaagagttaaggaaagggagtagaattgagaaaaatggttttgttttttttttatttgaggtttagttagggtttttttttttgtttttttttattttttttttttttttagtttgttgttttggttttagggttgagttattagtggggagagggggttgggtgggtagtaagggaagggttaggaaggatggggagggttgtagttttagttgttatagggtcggtttttggggagatggttaattcgggtagtaaggttggtatagagttgggatttaggtattttagagttgtttttattttttttttggggtttagaggtggagtaggtattttttttatttgtttttcggtcggggataggaggggaatataggaggttaggtatttaaggagtgaggttttgttatgttggtttgagtgttagattttttggttttttttggaatttttttatggagttattaagtgtttttttgaggtgatagaatttgggaaggtgaattttataggttgtttttttgagtattattttattttagtgtttttaggggtttttttttttttgaggtgagttaatttggtattttgaatttttttgggtattgtgtcgcgtttttttttgatttttttgttttttttttggttgttttattagttttgaattgttttaaggggagtgatagggtaggggtaaggaagggttttttcggaatttggagtttaaggggtttcgtagaggttaagaggggttgtttggttggagttaatgggagggtgaggaggtagttgttggaaagtttttgagtagttattttatttattttattttatttggggggttgggggtttttgttttttttagtttagtttgattttaggagaggggtagttttattttttattttttttgttttaagagttttatttaggtatttttttatttattttttttttttttggttgtagttgaggggatgggtttagtattgttttggaaggggttagtttttggattttgtgatttggattagatttaaaagtaggtggttggtagaattgtttatttgtgtattaatttgtattttatttgtatatagtaaggttttttttatttttaggattttttaatttttttcgtatatatttgggtgtgtgtggttggaggaagttggaattattttttgtatattcgtttttttttatttatgtgtaggtttttggttgtagatttattggattttgggttgggagttagagggttttaaagggtttttgagtgggttaagtggaagttaaaaatattttgggggggtgaagcgggggtttattttggaatttttgaggagggaggggtttgggatgtagggttgggattagggtattggttttgttttgttttttattagtaggtataaggttggttttaggtaataggtaggagggtattggtggtaaggggaagtattttaatttgattgatatgcgtgtttagttttgtttgtttagtattttgggaagtttagaggagggagttttttagtttttttttggttgagttgagggggttgggagggtatggagatttttttgtttagttgttttttgtatgataatatgggtagggtagtagtagtaataagggggtaatatttttattataggcgtgtttaaggttcggttttttattgaggttcggattttttagtgttattgtagaaaatttttaatttttatttttagttagatttgagttttcgttgtagagtgattttagttgttagcgtttttattttgattttagtgattatttggtatttttaagttatggaagtttttttatgtttttttgttgatttttttaaattattaaaggagtttttttttttttttttgttttaggttttttaatatgttagggtagaaatttttgggtttagttaggtacggtggtttacgtttgtaattttagtaatttgggaggtcgaggcgggtggattatttgaggttaggagttcgatattagtttggttaatatggcgaaattttatttttagtataaatataaaaattagttgggcgtggtggtgtatgtttgtaattttagttatttgggaggttgagttaggagaattatttgtattcgggaggcggaggtggtagtgagtcgaggttgtgttattgtattttagtttgggtgatagagtaagattttgttttaaaaaaaaaaaaaaaaagaaagaaaaaaagaaatttttgggtttttggagggagggttggaggtatgttagattagttttgatgttataataaatcggaataataatgtttatattagttatggttttatattagaatatttttttgtagaatagatttatttgtttttttagtaattttggaggttagtaggagaggggttgtttttattttatagatggggtatttagggtttagagaaggaaaggaaattgtttttttaggtagaataaattttagatttaggttcgtgggtttttaggttgagatgtttttttttcgtaggttgtgggtttttttttttatttgttaggtacgttagagagcggatgtttatgggtggttaggtagtggatttatcgaggtttttttagtttagagagaagtgattttttaggtttggttgttattttggttttttgttagtttttttggttaggaagttttatttttttttttaggaatatttttttagggtgaggtttgagttgttgttttgaagtataggtaaggttttattttttttttagtattcgtaggtagtatatttttgatttttagtgggtggagatattttaggttttggtatgtttaggttttgtattgttttgttttgtttagtttattttttgtagtttatatttataggttttaggtagaagttataggcgtggttgttgtttggtatttttagattggtaggaggtttagagtttaagttttgagttgggagttgtagagtgatagagttgttggggttaaatggtggggtatttgggaggtgtttgttattcgagaaggttagggttattaggattgagtaggggtttttggtagaatatttagaggttgtagggaggtgatgtggggagaaaatttgttaaaattgagtttttaaattggggtgtattagattttattagatggtgtgttgtgggtagaggaatttatttttttaataaagattttcggggtttttgatggtttaaggtttgttttttaagatggtattttagggttaatttttgtttttttttgttttagttatttttttggtatgggacgggttgttagggttttaagtatttttgtaggaatttgttgtttgtatttttaaagatggattttgggtaggttgggagtaaggtaagagttttttttttttttatttgttgtttatttattgggaattttgttttggggttatattgtttaaagtgttaggtatttattttaatttttatttgtgtgtttgttttaaggtaattggggaaggatgttggatattatttaggtcgtttaggggtttaggtttttaagatttgagtttttatatggttttaggaggaaaaatttagcgttttgataatttagttttttaagtttttttttttgaatttttagaatttgaattttttgttaggattttttattttgtttttttttggtttatttttattttaaaggttaaagtattttttttaaaattgagatttggttatgttatgtttttgtttaaaatttttttgtggtttttttaaggatttttttagtttgtttttgtgtgtttttttagaggtttttggattttagttatgttgagggttttgtaggtttttgatttattttgttggtttttgttttttggttttgtatatgtgtgtttttgtttaagtgttttttttttttttttttatttggagaattttggtgattgtttttagatttagattaggttattttttttgttggtttttattattgtttttttagttttgagtttgggttattgtgttttttgttttttattttcggggtatttttttttagtgttttttttttttgtttgttttattttatattgggtatttttggagggtaggagttgggggttttttggtattaagaatttgtaaatgtatgttgaataaataataagttgttttaagtggggtttggggagtttgaattcggatttattttcgtttttatttttagg

SEQ ID NO: 78 - DNA, 12711 bp, Artificial Sequence
  chemically treated genomic DNA (Homo sapiens)
tttggggatagggacggaggtgggttcgggtttagattttttaagttttatttggaataatttgttatttatttaatatatatttatagatttttggtgttaggagatttttagtttttgttttttagaagtgtttagtgtagggtaaggtaggtaaggaaaaaagatattagaaggaagtgtttcgggagtgggaagtagggagtatagtagtttaggtttagggttgagggggtagtgatggaggttagtagaagaggtgatttaatttgagtttgaggataattattagggttttttaggtgaagaaggggaggaagagtatttgggtaaaggtatatatgtgtagggttaggaagtaagagttagtagggtgaattagagatttgtaaggtttttagtatagttggagtttaggagtttttggggaggtatataaaggtaggttgggaaggtttttaggggaattatagagggattttaggtaggggtatgatatggttagattttagttttggaaggaatgttttggtttttgagatgaaggtagattagaagagagtaagatgaggaattttggtagagagtttaaattttgggggtttagaggggagaatttaggggattgggttgttagaacgttgggtttttttttttgaagttatgtggagatttagattttggagatttgggtttttaagcgatttgggtgatgtttaatatttttttttagttattttaagataggtatataggtaggggttgggataagtatttgatattttggataatgtggttttagagtagagtttttagtgggtgggtagtaggtggggagggaaagggtttttgttttgtttttagtttgtttagaatttatttttggggatgtagatagtaagtttttgtaaggatgtttaggattttggtaattcgttttatattagaggggtggttggagtagaaagaggtaggggttggttttgaaatgttattttagaggataagttttgggttattagaaatttcggggatttttgttaaaaaggtagatttttttgtttataatatattatttggtggaatttggtgtattttagtttgagaatttagttttagtagattttttttttatattatttttttgtagtttttaaatgttttgttaggagtttttgtttaattttgatggttttggttttttcgggtggtaggtattttttaggtgttttattatttggttttagtaattttattattttatagtttttagtttagaatttgggttttgggttttttgttagtttggaagtgttaagtaatagttacgtttgtagtttttgtttgggatttgtgagtgtgggttatagggagtgggttgggtagggtagggtagtgtagggtttgggtatgttagggtttggggtatttttatttattgggagttaggaatgtattgtttgcgggtgttgggaagggggtgggattttgtttatattttaagataatagtttagattttattttggggaagtgtttttgggagaaggggtgaagttttttggttagggaggttggtagggggttagggtggtagttaggtttggagagttatttttttttgggttgggaaggtttcgatgagtttattgtttgattatttatggatattcgttttttggcgtgtttgatagatgagagaagggatttatagtttgcgggaaaggagtattttagtttgagaatttacggatttgggtttagggtttgttttgtttgaaggggtaattttttttttttttttgagttttgagtgttttatttgtaaaatgggggtagttttttttttgttgatttttagggttgttagaggaataaataggtttattttataaaaaggtgttttgatatgaagttatagttaatgtgagtattgttgtttcgatttgttgtggtattaggattggtttagtatgtttttagttttttttttagggatttaggaatttttttttttttttttttttttttttttttttgagatagggttttgttttgttatttaggttggagtgtagtggtataatttcggtttattgttattttcgtttttcgggtgtaagtgatttttttgatttagttttttaagtagttgggattataggtatgtattattacgtttagttaatttttgtatttgtattagagatggggtttcgttatattggttaggttgatgtcgaatttttgattttaggtgatttattcgtttcggttttttaagttattgggattataagcgtgagttatcgtgtttggttggatttaggaatttttgttttggtatgttagggaatttggagtagagggaaaagaagagatttttttggtggtttagagagattagtagggagatataggaagatttttatggtttgaggatattaggtgattattggggttagggtgggagcgttggtagttagagttattttatagcgggggtttagatttggttggaggtggaggttgggaattttttatagtgatattaaggggttcgggttttagtgggaggtcgggttttgggtacgtttgtaatggaagtgttgtttttttgttgttgttgttgttttgtttatgttgttatataggaggtagttgagtaaaagggtttttatgtttttttagtttttttaatttagttaggaaggggttaagggatttttttttttgaattttttaaggtattgagtaggtagagttgggtacgtatgttaattagattgaaatatttttttttattattaatatttttttgtttgttgtttggaattagttttatgtttattgatagagggtagggtagggttagtgttttaattttagttttatattttaggtttttttttttttagagattttagagtgagttttcgttttatttttttagagtatttttagtttttatttggtttatttagaggttttttaaggttttttggtttttagtttaggatttaatgggtttatagttagaggtttgtatatggatgggggaaggcgggtgtgtagagggtggttttagttttttttagttatatatatttaggtgtgtgcggagggggttggagaattttgaaggtgagagggattttattgtatgtaaatgaaatgtaaattagtatataaatgagtaattttgttagttatttgtttttaggtttggtttagattataaaatttaaaagttgattttttttagagtagtattgaatttatttttttagttgtagttagaaggagggagagtaggtggagggatgtttagatggagtttttagagtaaggaagataggagatgggattgttttttttttggagttaggttggattggggggagtagagatttttagttttttagatggagtgggatgggtgaagtgattatttaagggttttttaatagttgtttttttatttttttattggttttagttaaatagttttttttggtttttgcggagttttttgagttttaagtttcgaaaaagtttttttttatttttgttttattattttttttggggtagtttagagttaatggaatagttaaggagaaagtagaagaattaaagaagggcgcggtatagtatttaggagaatttagggtattaggttggtttattttaaagaggagaaggtttttgggggtattggggtggggtaatgtttagagaagtagtttgtaagatttatttttttagattttgttattttagggaggtatttggtggttttatgggaggattttagagggggttaaaggatttagtatttaggttaatatggtagggttttattttttgggtatttagttttttgtgttttttttttattttcggtcgggaggtaggtggggagggtgtttgttttatttttgagttttagagaaggggtgggggtagttttgggatgtttggattttagttttatgttagttttgttgttcgaattagttatttttttagaggtcggttttgtggtagttgaaattgtagttttttttattttttttgattttttttttgttgtttatttagttttttttttttattggtgatttagttttagaattagagtaataagttggagggagagagagaatgagaaaggataggaaaaagagttttggttaagttttagataaaaaaagaataaggttattttttttagttttgttttttttttttggttttttagtattttttttgtatttgattttcgagggtattttaagtgttatttaattttaattttttttattgtaaaggggatttttttttttttttgtttatttttgattaagtttttttcgttgttgttttttttataagattaggttttttttatttttgtttagttgaaagttttttggtttagattggttattgggtagagttagaggaaaaagatattatacgagtaggttttttgtttttagttatagttgttgtgtttatttttgttggtacgaattttgaaggttgttaggtatttgttttgtttagggaaatatgatgttaggagagtatggtaggtgagtttggtttttgcgtattttaggtatgattttatttttaggagttattttgttttgggttttttagatatttttatttttaagtaaaagtgaaagagagagaaggatcggtagtatttttataggtttatagggttaggttagattagaatgtttggatttttaggagggaatgttagtgtaggtgttggagtagagagggtgttagtaattattttttagagaatagtttttgtttttttaaggaattttttatgtattttgttaagaagtttagagtattttggttttttgtttgttttttattttttatttttatagattaggagattgggttttgggttggggttagttttttatgttgtggattaggaattttagtttagagatgaaggtgatggggtagtaaagagggttttatttttgggtttttaattatttttgaggttttatgaatggagaataagaaagttgtgtttttttttttttttatttttagggtagtggataaatattacgattttgggtatatttttagggagtttttgtattttttgaaaattttttacgaattttagtttaagagtttgtttaagattacgaattattttatttttttaaagagatttttaggttaatagaatatgaggttgtagttcgttttattagttagtttttttgagttgtgtatttaggtagttgtttgtatttggttatatagttggttgtagttaagtttagttggtttttttaaatggtcgaggggtcgaatttagtgagatgaagagaagggttaagatatagaattatttttaggaaagattgaggatatttaagggagagaattgttttttagaggtttattagttttagaattttttgggtttttggtaggttgaatgttagttttagttttttagatagaaaagtagaatttttttgtttagttattttgggcggggtttatgggtaatgaggatgtatttaggttttggttttagcgtaagagtttttaggtgttttttggagaaaggtatatgtgtagaggattttacgtattttatttcgttatagttttattaatattttagtagaaggtatgttgtttttttttttttaatatgtgcggaaatttaggtttaggtattggtaatagatttgagataggatattggttatgggatttttaagttttttttttttttattatattaagttgttttttataggttagtagtagtgggaaagagtattagatttaggtttaattttttttgggggaaatttggtttagggaggggaaatattttgtttaaggttattaggtaaaagggttgcggaattattattgattttttttttttagtttgatttttttatttatgttattttatattatgtagatttggtattgaaagtttgaaaattttttttttagttagggtagaaagagttgatgtagaaatttgtgtttatggtggtttaggatttttaaaagatagagggttggttaaggttaggtggtagttgttggggttaggttgggaagggtgtggtagttttagtttttgtaagagtaagatggagttgaggttaagtttaggtaggtaggttgggttaggagggtagaattaaggcgggggtagagtttggattttggatattttaaatttttttaagttttgtaggttttagttagagtagggagattttttagtgtattttggatgtgattacgtttttttgtttagtggggttagaggttaggtgggggtagaggttaggtgggggtagatgtttggtagatcgtttagtttaaagtggtggatggtatttgtttaatttgttttaaatatcgtttttttttggatagttttattttttttaatcgttaattttcgcgcgttttgaggttacggtagagagatttttgaagtttggatatgtttttgggtatgagggcgtttggtggagtgagggggatttaggaggttgggtgtaattttttttttttttttttattgtgtatagtttttttttttttttttgtagttgttggggaaggagaatagaagaaagagaaaaatattgtttttttttttaaattaaaataaatatatttagggttgaagatttaatacgaatttgtggaatgtagggaagatgtttgcggggagagtgttattgtttgcgggtgggtaggaggagatttagttagagttgggataagttttttttttttttttatcgtttttatttttaaggcgttagagggagcgtatggatagttttaaacgtttagatttatttatcgttttattttttattcgttaagttagcggttgagaaggttatttagtttggttttgtagagggtgtggttggcgtggtcgtagattattagcgaggtgtttaaatgtatatgtttattttttttttaagcgtacgggaaggggggagttcgttgggtgtttattttgtagtttattttagtttttagttttggagagaataggttagtgttgggtattcggtttatagaatgggagaggatttagttatcgggattttattttcgtttttatgagagatttaaagggcggaggggtggcgtttagataggttttggtttcgttagtatttgttaatgattattgttcgattttatatttaattttttatttttcgttaatttttagtagttagagggtcgttttttaattttggtttttaagggttagttgttttgggtttcgatttagtttcggattcgtatttcgcgttcgtatattttttcgtttttattttatattttttagttttatttataggtagcgttgttgtcgttttgtttgtcgatggagggcgatcgagtagtcgaagaggttgttcgggttttcggttttttttattattaggaatcgggtatttaggttgaaggcggagacgacgtagtcgtcggtcgttattattaaggcgagcgtatagagtattaggcgtggggcgcggggcgcgcggttggggtcggggtttatggttgttagcggaagcggggtttcggcgagagcgcgtgagggcgcggagttgggcgtgaggatttgtttatttgtttttcgcgtcgtcggaggatattggaattcgtcggtcgttgcgtttcgtagcgttgatcggtttcgtgtttttagttttagttagttttatagttgcgttttcggatttttttttaagattcgtgggtttatttttttgtttttttagcggtcgggtcgtcgtcgtttttgtttcgggtaatcggtttttagtttgtttcggtcgcgtttttttggtcgcgttgtcgttttcgatttcggtttcgcggcggatttggtaagcgtatcggtcgatcgtaaggaggataggagggaggggtttttcggcgcgcgtttcgtttttttacgtttagtttcgtatttttttattttgcgagtttagttcgggttgcgtttttttttcggggaaagagaaaaagatttcggttcggtcgtttttttttaaaggggtagtatcgtttttttttttttattttttttattttagtttcgtttttttttttaaatatttgtcggtaatttttaaaggtttagatttttttttttcgtttttcgttttttcgagaaagcgtcgtttggggagtaagatggatgtgacgggcggggtcgggggtgggatttgtttggtcgtttttttgcggttgttgttgttgttgttgaaaaggttagtcgggttggagagatttggtattggcgtatttgggaatcgacgttcgtgcgcggttggttagaatgttggattcgttttcgtagcgttgtgagtttttaagaggtggttggcggtttttgggagttttttttcgtatttaggtttttcgttgtttttgtcgagatttattttttttatttatttattttgattcgagttgagattggttttttagtaaagatagatatatttagtagtggtaataattaaatgtcgttaattataattattaaaaagtatttttttttttaagtgttgcgatttttggtattaaaggttaagattgttaatgtagaaatgagttcgttttttatagaacgtattgcgtagtcgggaagttgagtttagatcgtatttatttttcgtttatttttgtttttagggtttagtttagtagaattttagaggttttttttttttatttaagttcgaatagagtgtttggagattgggttcggacgttagtatttattaggtgtttggtgggtagggttaggtggtagtaagtgggcggagattaaaggttttttttattaaggaattaaatcgaaagggaattttaagaggttattttggttaggcgtagtggtttacgtttgtaattttagtattttgggaattcggggagggcggattacgaagttaggagttcgagattagtttggttaatgtggggaaattttgtttttattaaaaaaatataaaaattagtcggtcgtggtggcgggcgtttgtagttttagttatttgggaggttggggtaggagaatcgtttgaattcgggaggcgtaggttgtagtgagtcgagatcgcgttattgtattttagtttgggtgatagagtgagacgtcgttttaaaaaaaaaaaagaggttattatgtatttttttggatttaatttatattttttttattgtagtttagagatttatttttttcggaatattgtttttttgttttgttttgttttgtttttgagacgacggagtttcgttttgttttttaggttggagtgtagtggcgcgattttcgtttattgtaatttttgttttcggggtttaagcgatttttttgttttagttttttgagtagttgggattataggcgtttattattatgttcggttaatttttgtatttttagtagagacggggtttcgtcgtgttggttaggttggtttcgaatttttgatttcgtgatttatttcgtcgttttttaaagtgttgggattataggcgtgagttattttgtttggttttttcgagtatttttttttttatttatttttaaaataataagaataaaatattatgtattaagtatatacgtagtaggaattatgttaaatgttttataaatgttaaatttttataataatttttgaagtgttatttttgttttaaaacgagaaaaatgaggtttagggaggttaggtaatttggtagaggttatataattaggatttttattttgtgttatttgattttggagtttttaattatttatgttaataatgaatatttatatattattttgggcgtgtttaagtttggtgggttttgaagtttgtgtaatttggggtgttttttaagaataaaattattttgtatttataagaattatgagtataaaattagatttagagtttgggaaagggttttggtttagttttatagtttataaattattttataagtaggtttattttatttttttggtttttttgtgaggtggggattatgatatttatttgatttaggagaaaatagagttttaggaggttatttgtttgtttaagatttgaattttatgggaggtagagttaggattgaagtcgttgattataatcgtgtttttaagaagataaattttaggtagatggttgttagatagttagatatgtttaaataaaagtagttgtgataatagttttttttgtggtgtttggggagaagatatttgtttttaacggtttttagaataggatttgtttttgatttttgatttttagagttatttagttttttttatggtttgttttgtggtttagggtttgtagggattagaagatatgtggggttaaggaataggaagttgatttggatggaagttgaatagtgatttttgttttttgtttggtttttgagttttttgttatgtttttggagaagaggagttagttagggtaagaagggtaggggtttagggtggaaacgttatgtgggtgaggattttgtttgaaatagttttgagagttttgcgatgatagattggttttatgttaggttttatttttttggatattttaaataggaatgattagtatgttcgattttgggattgggagtcggaaagggatgagggatggtttttttattttaggggagtgtttagagggaatgtggagtagagtaggggcgattggtagggggagggtttgagttaaagaatgtgggggagtgttagattagtttggggagatggagtgggagtggagggagatatggagattagaaggattttagttggagagatggagaaagagaaattttagggttttttggttttagtggtatcgtcgtttgtaggattattttattttttagttgattttattatgttaattttttatttgttaatttttttttatggggaagagatttatttagaaatatatagatagatagagaaataaggatataggaataatatgtgtaatgaggagtttaagtttatttgttgatgtttgttgatagattttaagttttattttttttttttttttgtgttttatatttggataagttgataagaaagtttgggtgtatttttttttggtgtttgagggggaatatttataagtttttttttgagggaatttttattttttaattataataaaaatttaggttagttttttttttggtttttttaatatatttgggatttgtttgaaagattggttttgttttttttggagattttaattatgtaaataataaatttttttatatttttttggtgtttgggtggtgtcgttagtttttatttaaattaaattttggatgggatttatttgtttttgtaggtgatcgtaataatatgtaaatggtgagttttgttggggggttatggaagttttttggaggaggtgtatttggataatagggaaagaaaggagttggagaagagaggtagaaaaattgggttttggtttaggtgaagtttttttagttggaataatgataatgttaatattttataaaggcggtttttgtttatttagcgtttgttgtgtttttataagtttttttttatttgttttttttttagtttttattttatttttttagagttttagagtatattaatggatattattatttttcgggtagattagtatagagacgtgaagtatataggtagttgttggaaaaataataaggaattgtaatggtgtgttttttcgttgaatgtaagtttttttttgtttttttattttgggtaagttatttttcgttttaggtttcggtttttttatgtgtgaaatgaaagggttggagagaaattttttattattttttaatttatatttattgtattttaaattttttaatatttgtttaacgaagtgtattaaattttagttattggattgagatttaggggtttatttgatttgaattgaaaatgtaaattattgaagagggagggagggaggagtgttgaagattgaatggatttattagattttttttttttatggtttagatgtaggtttagtttaggcgatttttttggtttagaatttgttaggtttaagtatttattgatagtttattatgtattaattttgggttgagttttaattcggggatgatttagaggaggttaggatgtggttttatgttttggttgtttttatatttaaataggttaaatttattttgtattgtatgttaggggtggtgtttgtgggataaagggggttgttagaatattttggttgttatatgaagttgattttgttaggatagattgggttgtgggggaaggtagttattgtaataatttggttaagaagtgggttgagtaggagtagggttgagggagggagagagggaatgagtaagaaaggtttagggtattgatttgattgggattttagggataggtgtggggcgagagggatgttggaagtgaaggagggaaagtgtagaggttttttggggattaataggtaatgatttttatgagggcgtggtgagtaggttttaaatattcggggatttttttgtttgttattttttt

SEQ ID NO: 79 - DNA, 6713 bp, Artificial Sequence
  chemically treated genomic DNA (Homo sapiens)
tttatttattttttttagattttttagtttatttgcgtagaggtgtttatagtattttttttaaattttatttttaattgatatttttttttatttgttgagtaaaagaacgttatgtaaaagtaaaataaggattttttaaggattttaaagttaattattgggtgtgtagaatatagtaagataatataatttaaattgtattttttacgtatttttttttttgtatttttttatgaggatgtttaatataaaaaaaaaagatagttacggataattttagaggattgtttttttaagtattttaattgtattttttattgattatttaatatagttatttgatattagttgtgaatattttttttttttttttaattttgttttattatggtataatatatatataaaatgtattatttttattattttaagtgtaaagtttattggtaataattatatttatatatatatttttttttttatcgttttttatttatcgtttttttttttatagtaattattattttattttttatgtttatgagatttgttttttaagtttttatatatgagtgagggtatgtaatatttgtttttttgtgtttggtttagtttatttaatataattgtttttaggtttatttatgttgttgtaaatgataggattttaatttttttatggttgaattatattttattatgtatgtatgtttttttatttatttatttattgatgggtatttaggttgattttatattttagttattgtgaatagtgttgtaataaatatgggagtgtagatatttttttaatgtattgattttttttttttaggatatatatttataagaattgttagattatattatcgttttagttttatttttttgaggaatttttattttgttttttatagtggttgtaataatttatatttttagtagtattgtatgagggtttttttttgattttattttgttatcggtaattgtttttgttttttttatataagttattttaattggagtgaggtgatattttattgtggttttgatatttatttttttaatgattagtgatgttgtatatgtttttttatattcgtttgttatttgtatatttttttttgagaaatatttgtcgagattttttgttaattttgaaattatattttttgttaggttttagttttgttgttattgagttgtttgagttttttatatattttggttattaattttttattagatagtgtgttaatgtttttttttattatgtgggttttttttatatttagttgatgttttttttgttgtgtagaagttttttagtttgatgtaattttatttgtttatttttgtttaggttgtttgtgttttttaggttttatataaaaaaatttttgtttagattaatattttagagtatttttttaatgtttttttttagtaattttataattttaggtttataatttattttgatttggttttggtgtattggttattttaatagatgttgagatagtatttgataaaatttaatatttttttatgataaaaatttttattaaaatggatatagaaggaatatattttaaaataatgaaggttatatatgataaatttatagttaatattatattgaatatagaaaaaatgaaggttttttttttaaggattgaaatagataaggatatttttttttattattgttattttatatagtgtagaaagttttggttagagttattaggtaagaggaagaaaggaagggtatttaaattggaaaggaagaagtggtgagaaagttttaattttatttttttgtatgtagttattaagtttttttagtattatttattaaagagattgtttttttttattgtatgttttttatagttttgttatagattagttggttgtaagtgtatggatttatatgtggattttttattttgttttattggtttatgtgtttgtttttatgttaatattgtgttgttttggttattatagttttgtagtaaattttgaagttaggtagtgtgatgtttttagttttgttttttttgtttaggattgttttggttatttagggttttttgtggttttttataaattttaggaatttttttgtttcgtgaagaatgttatttgtattttgataggaattgtattgaatttgtaaattgttttaggtagtattgtaattttaataatattagtttttttagtttattacggagtatatttttgggtttttgtgtttttttcgattttttttattagagttttatttatagtttttttttgtatagatattttatttttttagttaaattgatttttaggtattgtatatttttgtagttattgtaaaaggaattgtttttttgatttttatttagattgtttattgttgttatataaatgttattgatttttgtatgttgattttgtattttgtaattttattgaattagatttaatagtttttaggtggattttttagatttttttaggtataagattatgtagtttgtaaataaatttaatttgatttttttttttttaatttggatatttttttttttttttttttgtttgatagttttggttaggattttttgtattacgtagaataatagtggtgagagggggtatttttgtttgttttagtttttggaggaaaggtttttattttttttgtgtttagtatgatgttgattgtaggtttgttatatatggtttttattattttgaagtatgttttttttatatttattttggtgagaatttttattataaaggaatgttgaattttattaaatgttattttagtatttattgaaataagtatatcgtttttgtttttgattttgttaatgatttatatttagatggtatttaaagatataggaaatgggttagattttttaaagagggaagatggaaagagaatgaaagagtttttagaatatagttttgggggtttttcgtatttatggcggagggaagggagttattagaggaaatttagagtggttagatagaaaggtaggaaaaagtttaataaggtggtattatgagaagagagtttttttagaaggagaaatgtttatttttgataaaaattgaaaaatagggtgagtttatattagaattttcgttattggggaggattttttatataaggttagagattatttgtattttgtttattataattttagtgtataatgtatttttttggtatatagtgggtatttatatatatattaatttgatgatatttaataattgagtgtttaaatatttatgtcgagttgagagttagggataggtatgagttttttttaaatatttttttttttttttttttttatttttttatttgtttttagaagtattgattagagagatagtagtatttttagttttttttaaagtaatatgaaatatattttatttttgttaatattaggaaaagcgagttgttttttaagttttggaggaaggaaatttagttaattaacgtgaggtaatgtagggtggttattttttgaaaggtagtgaattataattataattatattatggaaaaaagttttgttttattaattattttattgattgtttgttattaaaattacgttatgaaacgaattgtgttgagtggtttttattgtaaaagattttggtgaagggagggaaagaaattggtaggggtttagattagaagatttggttttgttagtttttggagggtgttagaatggttttaatatatttatttttttggttttaattggaggttttgtagttgtaaataagaaggattgtatagtttagaataacgatattgtaagtttattgtggaattgggttaaaattagtatgtagatttattaagaaagaaatatatttagtattattatagaaagaaatagttatgggttttgattgttagttttttggaagttattttatttttataatagatttattatatattgtattgattttttttagtatagagtaagagaaagttaatattttttatgttttgtttgttgatagattgaaaataattgtattgagtttggttagaatattttgttattttataaatattttaaattttatatggttaaaatttaatttatttatgtttttatttgtatgtatatatatatgtatataattttattttttagtgtttttttttttatgaatggtagtattatttttttttaagaaagagaaatatttttttttgggattattttatttttatttattgttgtaggggtttttaaaattaggttttttgtgtttagttttgtatttatatttttgaaatttagagttgatcgagataaattttttaattttttgttagttttaatatagatttaaaatttttaatttggtttatgaggtttattatgtatttttgtttttttaagttagttttatattatattaatttgtgtgtggagtggttaaatattttagttaggtaagtttttttagtttttttatttggtttttttggagttttttttattgtttattttatttttagtttgatttaagatttttggttttttaaatttttttttaagtgtttttatttggatttttttttagttagtataaatttttttatttattattggagcgaatattttttgaaattttgtattagttttgttttatttttggtggaattttgtggttttagttaagtgtttgttttatgaatgtgttgaataaatgaataagtattttaattgtgtatttgttattagtgttagatgtgttatttattttagtatggttttagtatatagatatattttttgatgtagattttttttttttttttatatatagtaataataaaaaattagatttttattttttgaaaatattagtttaataattatttatggttgtttttttggttgttgaaggaaaaaaaaaaaaaaggtagggtatatttggattgtattagaatgagatttattatttagtttaggtgtgttgcgttgtgggttttcggtatattttagaggtttattaggattttgattttatattggggtttatatttttaaaagtaggtgtgtttcgtggtaattgagtgggtgcgtgaaaaggggggattattaattattagttggagtaattcgaatcggttaaagtgaattaagttatagtgtttttttaatttaatttttttgttggggttagttatagtttaaatcgtttgtcgtttagtttgagaggttgttgttagtttgtttacgtatgtagttcgggttgtagaggaagtgtggggaggaaggaagtgggtatagaagggtgttgagatgtgggttttgaagagaatagttataacgtttttgttattaaaatgttttttaggggttttcggcgagtttttttgtttggttttttgtttttaatttgtggtttttgataatttatttagtggttgtttatatttgaaaaataagatatagtgtttaattattaacgaaagaattggacggtttttcgtcgtagttttatttttcgagtttgtggttggtatttgggttacgtcgggttgggcggttatagcgaggggcgcgtagtttggggttatatagtttcgtttttaggttttaattatcgttaaaaggggaagttcgtgttttattaggttcgtttttgttgagtttagagttatttcgcgttttgcgggttgggaggttcgggttaggacgcgagttttgcgtagtcgaggttttttagcgttttttgtagtcgcgcgtaggtagagacggagttcggttttgcgttttcgtattacgttcgggattttatttagcggttcgtattcggagaagtagcgcgagtattcgaagttttcggttggcggtagaaatcgggagtggggtcgggcgagtgcgcggtattttaggtcggttcgaacgtttcgttcgcggtgggtcgatttttttttttttttttttttttttttttttagttcgttggcgtcggatacgttgcgttttattttttggggcgttttttttcgttggttaatcgtcgtatttcgtgtaattttggggtagtggtcgtttagtgttgaatgttttttatcgagagcgtatggtttgggaagcgaggcgcgaattcggttttcgaagggtcgtcgttcgggagacggtgatgttgttgttgtgtttgggggtttcgatcggtcgtttttataacgtggatattgagagcgcgttgttttattagggtttttataatacgttgttcggttattcggtcgtgttgtatagttacggggcgaatcgatggtgagtagagttggattgatgcgtttttagtagtttagagcggcgtgagaatggcgttttagggattttttgttcgatttaaattttttttttttttaaggaggtaggagggaaacgttgcgagagttagttcgttggaaatttgttagggaaattaatttattttggggcggtagcgtttcgggtgcgttatggtgtaaggttttggagtttcgagtcgggggtggtgggcggaggaggaggtggggaagttgttttgttgcggattgtatatttgtggcgatagggagtttagtgggtagtatagtttacgtttgagcgtacgtgtacgtgtttcgttttagg

SEQ ID NO: 80 - DNA, 6713 bp, Artificial Sequence
  chemically treated genomic DNA (Homo sapiens)
tttaaagcgagatacgtgtacgtgcgtttagacgtgagttgtgttgtttattgagttttttgtcgttatagatgtgtagttcgtagtagggtagtttttttattttttttttcgtttattattttcgattcgaagttttaagattttgtattataacgtattcggggcgttgtcgttttaagataagttagtttttttggtagatttttagcgagttggttttcgtagcgttttttttttgtttttttgggagggaggaaagtttgaatcgggtagggaatttttagggcgttatttttacgtcgttttgagttgttgagggcgtattagtttaattttatttattatcggttcgtttcgtggttgtgtagtacgatcgagtagtcgaatagcgtgttgtgggggttttggtaaagtagcgcgtttttagtgtttacgttgtaggggcggtcggtcgggatttttaggtatagtaatagtattatcgtttttcggacggcggtttttcgggggtcgggttcgcgtttcgttttttaagttatgcgttttcggtggggaatatttaatattaaacggttattattttaaagttgtacgggatgcgacggttggttaacggggaagaacgttttaagagatgaggcgtagcgtgttcggcgttagcgggttaaaggaaggagagagggaagaggaggggaagtcggtttatcgcgggcggagcgttcgggtcggtttgggatgtcgcgtattcgttcggttttattttcggtttttgtcgttagtcgggagtttcgggtgttcgcgttgttttttcgggtacgggtcgttgggtggggtttcgggcgtggtgcggaggcgtagggtcgggtttcgtttttgtttacgcgcggttgtagggggcgttggggaatttcggttgcgtaggattcgcgttttggttcgggttttttagttcgtagagcgcgggatggttttgggtttagtaagagcggatttgatggggtacgggtttttttttttaacggtggttggggtttagaagcggagttgtgtgattttaaattgcgcgtttttcgttgtgatcgtttagttcggcgtggtttaaatgttagttataaattcggggagtgggattgcggcggggagtcgtttagttttttcgttgatagttaaatattgtgttttgttttttaggtgtaggtaattattagataaattattaagagttatagattaaaaataaaaaattaaataaaaagattcgtcgaaggtttttggggaatattttagtgataaagacgttatggttattttttttaagatttatattttagtatttttttatatttattttttttttttttatattttttttgtagttcgggttgtatgcgtgagtaggttagtagtagttttttaggttgaacggtaggcggtttaggttgtggttgattttaatagagaggttgggttaaggaagtattgtgatttgatttattttaatcgattcggattgttttagttggtaattgatgattttttttttttacgtatttatttagttgttacgggatatatttgtttttaggggtgtaaattttagtgtggggttagggttttaatgagtttttgaaatgtgtcggagatttataacgtaatatatttgaattgggtagtgagttttattttaatgtaatttaggtgtgttttgtttttttttttttttttttttagtaattagagagatagttataggtgattattagattgatatttttaggagatgaaagtttagttttttattgttgttatatgtaaaaagaaaagaaaagtttgtattaaagagtgtgtttgtgtgttaaaattatgttggaataaataatatatttgatattaatgatagatatataattaaaatgtttatttatttatttagtatatttatggagtaggtatttgattaggattataggattttattaagagtaaggtaggattgatataaagttttaaaaaatgttcgttttaatggtagatagaaaaatttgtattaattagagaaagatttaggtaaggatatttaaagagagatttgaaggattaggaattttgaattaggttaagaatgggatgagtaataaggagggttttagaggagttaggtagaagaattgagagagtttgtttggttagagtatttagttattttatatataggttggtgtgatatgaggttgatttagggaagtaggaatatatggtgaattttatgagttaggttaggaattttaaatttatgttgggattgataggaagttgaagaatttgtttcggttagttttgggttttagaagtgtgaatgtaagattgaatatagaaaatttaattttggaagtttttgtagtaataagtagagataggataattttaaggggaagtattttttttttttgaaagagaatggtgttattatttatggagaaaaaaatattgagaaatgaagttatatgtatgtatgtgtgtatgtagatgggggtatggatgggttaagttttagttatgtggagtttgagatgtttatggaatgataggatattttagttaaatttaatgtaattatttttagtttgttaatagataaaatatgaggaatattaatttttttttattttatattggaaaaagttaatatagtgtgtgataaatttattgtaaaaatgaaatggtttttagaaagttaataattagggtttatggttgtttttttttgtagtagtgttgagtgtgttttttttttagtagatttatatgttgattttaatttagttttataatgagtttatagtgtcgttattttgaattatgtaattttttttgtttatagttataaaatttttagttgaggttaaggaagtaggtatgttgaagttattttgatattttttagaaattggtaaagttagattttttgatttgaatttttattagtttttttttttttttttattaaaattttttataatgaaagttatttaatataattcgttttatagcgtagttttggtgataagtagttagtggagtggttggtaaggtaggatttttttttatagtatggttatagttatgatttattattttttaagaaatagttattttatattattttacgttagttagttgaattttttttttttagggtttggaaaatagttcgttttttttaatgttagtaggaataaagtgtgttttatgttgttttaaaaaaaattgaagatattgttatttttttgattaatgtttttgaaggtaagtgagggggtggaggaaggagaagagaaggatgtttaagaaagatttatgtttatttttagtttttaattcgatataaatatttgggtatttaattattaaatgttattagattaatatgtatataagtgtttattatatgttaaaaaaatgtattatgtattaaaattatagtagataaaatataagtgatttttaattttgtgtagaaagttttttttagtagcgagaattttaatgtggatttattttattttttagtttttattaagagtaagtatttttttttttaggaagattttttttttatgatattattttattaagtttttttttgtttttttatttggttattttgagttttttttgatggttttttttttttcgttataagtgcgggaaatttttagggttatattttggaaatttttttattttttttttattttttttttttaggagatttaatttattttttatgtttttaaatattatttaaatataagttattaatagaattaaaaatagaaacggtatatttattttaatagatgttgagatagtatttgataaaatttaatatttttttatgataaaaatttttattaaaatggatatagaaggaatatattttaaaataatgaaggttatatatgataaatttatagttaatattatattgaatatagaaaaaatgaaggttttttttttaagggttgaaatagataaggatatttttttttattattgttattttacgtagtatagaaagttttggttagagttattaggtaagaggaagaaaggaagggtatttaaattggaaaggaagaagttaaattaggtttgtttgtagattatatgattttatatttagaaaaatttaaagagtttatttaaaagttgttagatttgatttagtaaagttgtaggatgtaaaattaatatataaaaattaatagtatttatatgataatagtgaataatttgaataaaaattaagaaagtagttttttttataatagttataaaaatgtataatatttaggaattaatttaattaaaaaagtaaaatatttatgtaaggaaaaattataaataaaattttgataaaagaaatcgaagaggatataaaaatttagaaatatatttcgtgatagattggaagaattaatattgttaaaattataatattatttaaagtaatttatagatttaatgtaatttttattaaaatataaatgatattttttacgaaatagaaaaatttttaaaatttataagaaattataaaagattttgaatagttaaagtaattttgagtaaaaagaataaagttggaggtattatattatttaattttaaaatttattataaagttatagtaattaaaatagtatagtattggtatagaaatagatatatagattaatggagtagaatagagaatttatatataaatttatgtatttataattaattaatttgtgataaagttgtaaagaatatataatggaaaaaaatagtttttttaataaatggtgttaggaaaatttaataattatatgtaaaaaaataaaattaaaatttttttattatttttttttttttagtttggatatttttttttttttttttttgtttgatagttttggttaggattttttgtattatgtagaataatagtggtaagagggggtatttttgtttgttttagtttttggaggaaaggtttttattttttttgtgtttagtatgatgttgattgtaggtttgttatatatggtttttattattttgaagtatgttttttttatatttattttggtgagaatttttattataaaggaatgttgaattttattaaatgttattttagtatttattgaaataattaatatattaaaattaaattaaaatgaattatagatttgaaattatgaaattattaaaagaaaatattggggaaatgttttaagatattggtttgggtaaagatttttttgtgtaagatttaaaaagtataggtaatttgaataaaaatagataaatgagattatattaagttaaaaagtttttgtatagtaaagaaaatattaattaaatgtagagagaatttatataatgagagaaaatattggtatattatttgatgagggattaataattagaatatataaggagtttaaataatttaatagtaataaaattaaaatttaataaagaatgtaattttaaaattggtaaaagatttcgatagatattttttaaaagaagatatataaatggtaaacgggtataagaaaatatgtataatattattaattattagaaaaatgaatattaaaattataatgagatattattttattttagttaaaatggtttatataaaaaaggtaaaaatagttgtcggtgataaaatggggttaaaggggaatttttatatagtgttgttagaaatgtaagttattatagttattatgaagaatagaatagaggttttttaaaaaagtaaaattagaacgatgatatgatttggtaatttttgtgggtatatattttaaagaaaggaaattaatatattgaagaaatatttatatttttatgtttattgtagtattatttataatagttaaaatatggaattaatttaagtgtttattaatgagtgaatggataaagaaatatatatatataatggaatataatttaattataaaaaaattaaaattttgttatttgtagtaatatggatggatttggaggtaattatgttaagtgaattaagttaagtatagaaagataaatattgtatgtttttatttatatgtgggagtttaaaaagtaaattttatgaatatagagagtagaatggtagttattataggagaggaaacggtaggtggagggcgataaagggaaaaatatatatataaatgtagttattgttagtggattttatatttaaaatggtaaagatgatatattttatatgtatattgtattataataaaataaagttaaaaaaggaaaaaagatatttataattaatattaaataattgtattggatggttagtgggggatataattaaaatatttgaagaaataattttttaaaattattcgtgattgttttttttttttgtgttaaatatttttatagaagagtataaaagaaagagtacgtagaaggtataatttaaattatattattttattatattttatatatttaataattggttttaaaatttttgaggaatttttgttttgtttttgtataacgtttttttatttagtaggtaaaaaaaagtattaattaaaaataaagtttgaagagaatattataaatatttttacgtaaataaattagaaaatttagaagaaatggataaa

SEQ ID NO: 81 - DNA, 16167 bp, Artificial Sequence
  chemically treated genomic DNA (Homo sapiens)
  unsure (10329..10330, 10436, 10576, 10589..10590, 10595, 10598, 10615)
  unsure (10634, 10639, 12165)
attttggtgtttttaaatatgttataaataaataaataaataaataaataagaaaaattgaagaatttttaggaagagaagatattagtaagagtgaggggaaatttttttttattgatttgtttaatttggatttttgggttttatattttgtattttagtgtttttttagttttgttttttttttgttagtgtttattttttagtttttgtttttatgtgtttttttaatttagtttcgtttgaaaaaatttttagtttggtttttatagaggtatttagttataggttttttttgtttgtttgtttgttttgagtttgagtttttttttgtcgtttaggttggagtgtaatgatgttatttcggtttattgttatttttatttttcgggtttaaacgatttttttgttttaaatttttgagtagttgggattataggttttcgttattatgtttagttaattttttgtatttttagtagagacggggttttattatgttaattaggttggttttaaatttttgattttaggtgatttattcgttttagttttttaaagtgttgagattataggcgtgagttacgatatttggttttagttatagttttaattattgggttcggagttttggagtaataatagaatttacgaattttattgttaaggtttgtttttgttattttagtaaatattttttatttattttttttgtgttttgtgtaaattggggatagaaaaaggagaggagtttgggtttattttaggtataggatataggggaggggttttttttgggttagatagcgggtagggatggtggaggtgatttatagatgatagagtttttagtttttttaggtagagatttgagttagagaagtaatagagtttgagggtgtaaatggtttatttttgtattttttaattttttttttttagatatatacgtatatatatatagaataattttttagttttagtagtttttggattttggtataattgggtttttattttatttttggaaatttttttattttcgtttttagttttataatttttttaaatattttattttttttttttttgtgagatttaatttttttgtttgtttgtttgtttttgttttgttttgtttttgagatggagtttcgttttgttatttaggttggagtgtaatggtgtaattttaggttattgtaatttttgttttttaaggtttaagtaatttttttgttttagttttttaagtagttgggattataggtatttattattacgcgtggttaatttttgtatttttattagagacggggttttattatgttggttaagttagttttaaatttttgatttcgtgatttatttattatggttttttaaagtgttgggattataggtatgagttattgtatttagtttaggaagttttattttatggatattttagtttttattatttttatttaattagattttttatagtttaataagatttgagtttgttttttaaaattaaggtatttagttttagtgtttttagaatttttaggtatttgagaattttaaagaagttattgagttttattttagagaaattatatgtatataaataaaaatttttatttagttttagaggattaatggattgtatatttaatttttttttattttattttaaggataatggatttaggttataatttttattttagaatttttttttatatttttgtagaaatttagtcggtttatagggttgatattgtagtgggaaaagtaacggttttgaaatttattgggattgggtttggatttatttttgtttttttttgttggttttcgtttagttattttttttttttaggtttcgattttttaatagtaaaatgaggattatgatatttttagtgttggataagttgggataaatgggatagaggtagattaaaggttaagtttagggttaggaatatagtatgtgttaaataaattattattagtattttttattttttttttatattattaaaatttagtatgatttttggcgttagaatttgtatttgtattttgaatttttttgtggaaatttatttttgtggttttaaaattttagtttttagggtaagtaggttggcgataataggagtttgttgagtgttttggttttgttttttatttttttttttttttattaagtagattatgattaataatggttagttattatagtaaattatttttattgagtaatgaagggatagagggtattaaagaggttaggtttaagagaaaaagtagaggtatttggagatatataaatttggttagagaaaggttgagagatatataagatagaaagaaaaagttgagaggagatagattatttagaggggtagtgggtttagaggagaaggtattgggtttggagtttaaatatttaggttttaggtttatcgttaattggttagttatatgattttggataaattattttatttttttatatttatttttttttttgaaggagaagattggattgatggtttttattttttttttattggtttttttaggttagtttttaggtttggaggtttgtgttgaagtagttttaattaggaggggattttaagttaaggacgaatttagagtagaggaagagaggattaggtaaaggtaggtatggtgagaggaaaggtaggaggtgttggggttattgggagaggatttataagggtagaaagagttaagagaggagggatattgggggagagtagaaaggttagttaaagaatgattaaggggttttcggtgtaaataggagtagggaatggatagggagggggtttgtttgagttggttaaggttaggggtggagtggggaggaggattggggtaggacgttatgttttttgttttttattaaggtttttgggaggagttgagttatatatttttttttttgtatttttttttatttttatttttaattttttaaattttgggaaaatttaaagagtttgtttagattgagaaaggagagtgtttggtttatatacgtgttttgttgggttaaaaagtaattaggttttagtttttttttttttaaaggggtttttagtttatggtttgagtagtttttatttaaaggttgtttttttggtaatgttgggtttaaagattttgatttagagattttttggttttttatttaagaaagggttaggatttgtagatgtgagaatgggatacgggttagtattgttttatagtttggttagttagttttttttttgggttgtagttggttttggaggggggtttttaaaaaagtagatgggtgatttgggataggaagtggagtagtagagtgagggggagagttatggtaggaaaaaaatattgattttgggtatttttattttgagttttttagttcgaagtggggtaggggattggagaatagaagggatagggttgataggatattattgatagggtattattttggaaagtgaggagttttggaggaaagagattgaaaggatttgtagtttttttttttagattaagataaaggttagaattttgaaaagtgattttattatatagagtttgagtttggggaagaggtgggtagggggttattgttttttttttttagagtttttttttttatttttataggggaatttgggaagaatggggttttggtttttcgtttttattgtttttttggtttttggtttttggattttttttttttttttttttttggatatagttttgttttgttatttaggttagagtgtagtggtgtaatcgcggtttattgtagtttttgttttttgggtttaagtaattattttgttttagtttttcgagtagttgggattataggtgcggattattatatttggataatttttgtatttttagtggagatgggttttgttatgttggttaggttggttttgaatttttggttttaggtgatttgtttatttcggtattttaaagtgttgggattataggtgtgagttatcgtgtttggttagagtttttagcgtttatagttattaggagttgaaggttgggtttttttgtaagattttttattattattattattttttataattttttaggtttgtaggaattcggttagtttaattaagtaggtattgaggggttagttattcgtaggtttttggttaattgttagatttaaggaaggggtttagtagaggtttatatattttaggattaagaagggggtaaattggagtagaatttttttgatgaatgattttaaatttttgggtttttaatattagtaagtttggaggaggaagtagcggaatttgaggagttcgtgtaggttttttagtaagttgattgcgaacgttgtttttgtattttaattgttgtgttttaaatttagttggttagaatttaggtattcggcggtttcggaaggtaagggggaattttagttggtcggacgttagaggagttttttgtttttttagattttaaagttttttttttaaagtattgagggagattttatatatatatataggtttttttcgtttattagaggtgatttttttttttattaggaaatttttcgttttttttttcgattcgtttttcgagcgtttacgttgtatatttggaaaggaatggggaggaaggagggggaagtagagaggaggggggaagaatttaaattcgtttagtttaatttagtttagataatcggtttttagttggggttggggaaagggggttggaggggtgcgtttttttttacgttttttaggggtgggggacgcgggtttagagttttagggatttaggaatgttttttcgttagttttttcggtaggcggggggagggtttagtcgggagtttggtaaattttttttcgcgttgagttattcgtttttgggaggtttaggaagcggtttcgggtcggtggttttaggatagggaagagcgggcgttatggggagtcggacgttagagttttttttttacgtcgtgtagttgcgttgggggttttcggcgtcgattttcgttgtttgcgttgttgttgttgttgttgtcgtcgttatttagggtcgggggttttaatttagacgcggaggttttagtagtattttcggggttttcgggtttttttttcggatttttagtggagttttatcggtcgggaatagacgggtgagtgaggagggttggagacgggatgggggtgggggagtcgtttggagattgggggcgcggttggggtttggaggggattagggtttaagtttgagggtggagtttgtaaggaatagagttgtagttgggggatttggttagaattgggggttcgcgttggagtagggagggtatcgtggcgggtgaggaggggttttggcgtttgagattagtggggagatatgtgttcggtggggagaggatacggagttggagaagtttgggtaggggttttcgggttaagggagaggagagcgcgtgaatggagagttgagggtttttggttgaagtttgtgggttgttgggatttggggcgggtgggggcgtagagggggcgtagaggtcgggaagggtttttgggggttttaggagatttcgggattcgtaggggttattgtgcggcgagagaacgggtagaagtcgaatgagttacgtgtagtaggaggaaagttaaagattgagggggtcggaaggttaaatgggggttagttttatttttttttttttttttaatttagatcggggaaagattcgagagaggacggcggttttttttttttttttttttgttttttattttttttttcgtttttaatttttgtttaggcgaggggattcgagaattgggggcgagtgcggggattttggtattggggttttggggttgggggcgaatttagttaagggcgggtgttgggatgtgtcgggaggggtgtgtgcgcgcgtgaaggggggtgggcggtttttttttttttttggtttttgggaggaagagaaaagttggttttttgtagttggtcggttggagttgtgttgagatcgggatttttggggttggggtcggaagttggggagacgggggtttcgtggggttaagaacgttagaatgaaggatttaggattttggaaattttaaaggaggatttttatttttaatttagtatagtgataagtagattcggatttcgagtgtttagaaaatggggtattgataggtttgggaaataggagttagagtggaagtaatattagaattaagggtgtttgtttaaatgtgggatggcggggagattgggaagtaagagaggtaggtggttgtttttgggttaggttatagatgttagatttttggttttttataatgattggtgtaatttttttttttttatatttttgagttgggagttttttattgtttatttttattttaattttaggattttagggtttgaggggaattttgttagaagcgatttgtttttatatatgagatagttaattgatttttatttagtttttatagtttttggagaaaaggggttaatttagttaatataattggggagaaaggtaaatttttttttgtttggaggatttggggatgggagaaaagaaaaatgattaggtttcgattgttgttttgggttatttaagtttttatttaatttttattttatttttttggttttttgtttaaattttattgtattattattttggtttggagtttttgttaggtttggttttttttaggtttttttaaattttttattatagttttaatggagtagaaaagagggaaggaggaaggggatgaggttttttttcgtagattagagtatttagttgtttggtatttaattttttttttattttttttttttttaaatttttttttaaaatatttttttaaaatatttggattttatatatttttggttttttaggtgtttgtttggtttttgtttgattttgtagtttttaaagtttttttttaaaataggatttagtttttttattttttttttttttttttttgtttatttttttttttaagagaatttaggtgtttagtttgtatttttttttttttattttttatttataatatttttttatagtggaatattttatttttttagtgatttttttttattatagttaggtttttatttttttttttataatataagataaatatagttttttatttatagttattgttaaagagggagagttttagtgtttttgttttttttgtattattttttgtggtgaatattaaaatagtattaaaggatagggcgagtattaaagtagttagatggtaggaaagggtaaagtttttagttagatagaggtaggtgtgagtttttattatttattagttttttgcgtggtattttagtatttagggagaggtatttaagtttttggagtttggttttttcgtgaaaattagatatttgattaacggagttttgaggattaaatgagaaaatatatataaaaggaatttggtttatagagagtgattaatatatgggcggtatggtttttatggggtagttgtttttgtttttggtttttttttttttggttatcgtttagtttttttattttttatttgttttgagtatttgtttatattagtgatagtaataatagtttgttatatttttttagtatttttatatcgatttttttattggattgtaataaaaatttttgtgttaaagtaaaggaagtattattgttttatttttagatatataaaaattgaggttggttaggtgtagtggtttacgtttgtaatgttagtattttgggaggcggaggtgggtggattatttgaggttaggagttcgagattagtttggttaatatggtgaaattttatttttattaaaaataaaaaaattagtcgagcgtgttggtacgtatttgtaattttagttattcgggaaattgaggtaggagaattttttgaatttgggaggtagagattgtagtgagttgagattatatttgtattgagcgattttagattgggcgatagagtgagattttattttaaaaaaataataataaataaataaaaaataaaaataattgaggttttaggagttatagaaattttgaattagaagttagtttaggaaatatttaagggaaatttattattttatgttagagaatttaaagtttgaagagaggtagtgatttggtttaggatatttgaaagtttgagaggtaggttagttttagtttagttttttgtttttttttgtaattgttataagtggagatagttgtttttttttagttaattatatatattttttgtgaatgtattaggggattttaaattaggtgtttttttttggtttggtttatgttgttgtaggatttgtaggagttgggcgttggtttatttgttgttttttatttttgattttgttaggttaatagagttaaatagtaatttagtattgaattgggatttggttaattaaaagttggggagatagtagatatgagaggagggaataagttggtaatggggtagattagaatgttgtcgtagaaattaggatttttgatttttgttttatattttgggagggattatgagtgatttaagtttattatttaatttttttgagatagtttttttatttgtagaatgagaatatgggacgaggtgagtagttttgaatttttttttagggagtgttagaacgaggttagtttgtttttatgttatgtggttttaggtatttatagtgaagttttaaaattagtggatgttttttatagtgttttttagttgtggtagtttgtgtttttaaggattaatttttttatttttgaggttttagtataaattttggtagttatttttttttttagattttattttagaaaagtgtattttgtaatttgtatttagtaagaaatatgaattttttttttattttttttatttttttttttttttttttgagacggagtttcgttttgtcgtttaggttggagtgtagtggcgggatttcggtttattgtaagtttcgtttttcggggtttacgttatttttttgttttagtttttttaagtagttgggattataggcgttcgttattacgttcggttaattttttgtatttttagtagagacgggggtttatcgttttagtcgggatggtttcgattttttgatttcgtgattcgttcgtttcggttttttaaaagtgttgggattataggtgtgagttatcgtgttcggtttgattagtagttttttttttgaggtaggattttatttttttatttaggttggagtgtagtagtaagatttcggtttattgaaattttcgttttttgagtttaggtaatttttttattttagttttttgagtagttgggattgtaggcgtatgttattatattttagttaatttttgtatttttagtggagatagggttttattatgttgtttaggttggtttttaatttttgggtttaagtaatttgtttattttggttttttaaagtgttggtattataggtgtgagttattacgattggttttttttagtagtttttaggaattatttttggaagtttagtttagagtttgtttttttagttttttttagaattttgtgatttatttatttgatgttttagtaataagttttttattgtttaatttagttagaatcgattttgttttttgtaattaaattttgattaatatggagaatagggtatatattttaaaaaataaatataaatatttttatagttgaaagagttaaggaaagagtagagttaatttaaagagaagagggttgggtatggtggtttatatttgtaattttaatattttgggaggttgagatgggaggattacgtgaggttaggagtttgagattagttttgggtaatatagtgagattttatttttattattaaaatatagtaataatagtttggaattatttttatttattggattgttggtatattttttggagttagtatttttgaggttgtattgtattattgttagtatttttattttttattttttggttgatagatttttggttttttttttaagtaatataaagttttagttggttttatggatttgatttattggatgatttttggagggttagtataattttatttgttgttgatttgtttttaagatatgtttttattttatttttgttttttttatattaagaacgnnnagtaaacgaaagaggggaaagaaaagaggaagaaggggagaaaaagaaaagagaggggaagaagataaggagagaagggcgagaaagtagaaaaaagagaacganaaaaaggaacgggaaaaaaaaaggataaaaggagggaagaagataggaggaaagaagaaaagagagaagaaaagaaagggaggagggaaggagagaagaaaagcgcgaaaggaaaagaaggggggaaaaaaaaaaaaganaaaaaaaggtttnnntaanaanaaaaaaaaaaaaaaaanaaataaaaaaaaaaaaaanaatancgaatttttattttatttttttggttttttgtttaaattttattgtattattattttggtttggagtttttgttaggtttggttttttttaggtttttttaaattttttattatagttttaatggagtagaaaagagggaaggaggaaggggatgaggttttttttcgtagattagagtatttagttgtttggtatttaattttttttttattttttttttttttaaatttttttttaaaatatttttttaaaatatttggattttatatatttttggttttttaggtgtttgtttggtttttggtttgattttgtagtttttaaagtttttttttaaaataggatttagtttttttattttttttttttttttttttgtttatttttttttttaagagaatttaggtgtttagtttgtatttttttttttttattttttatttataatatttttttatagtggaatattttatttttttagtgatttttttttattatagttaggtttttatttttttttttataatataagataaatatagttttttatttatagttattgttaaagagggagagttttagtgtttttgttttttttgtattattttttgtggtgaatattaaaatagtattaaaggatagggcgagtattaaagtagttagatggtaggaaagggtaaagtttttagttagatagaggtaggtgtgagtttttattatttattagttttttgcgtggtattttagtatttagggagaggtatttaagtttttggagtttggttttttcgtgaaaattagatatttgattaacggagttttgaggattaaatgagaaaatatatataaaaggaatttggtttatagagagtgattaatatatgggcggtatggtttttatggggtagttgtttttgtttttggtttttttttttttggttatcgtttagtttttttattttttatttgttttgagtatttgtttatattagtgatagtaataatagtttgttatatttttttagtatttttatatcgatttttttattggattgtaataaaaatttttgtgttaaagtaaaggaagtattattgttttatttttagatatataaaaattgaggttggttaggtgtagtggtttacgtttgtaatgttagtattttgggaggcggaggtgggtggattatttgaggttaggagttcgagattagtttggttaatatggtgaaattttatttttattaaaaataaaaaaattagtcgagcgtgttggtacgtatttgtaattttagttattcgggaaattgaggtaggagaattttttgaatttgggaggtagagattgtagtgagttgagattatatttgtattgagcgattttagattgggcgatagagtgagattttattttaaaaaaataataataaataaataaaaaataaaaataattgaggttttaggagttatagaaattttgaattagaagttagtttaggaaatatttaagggaaatttattattntatgttagagaatttaaagtttgaagagaggtagtgatttggtttaggatatttgaaagtttgagaggtaggttagttttagtttagttttttgtttttttttgtaattgttataagtggagatagttgtttttttttagttaattatatatattttttgtgaatgtattaggggattttaaattaggtgtttttttttggtttggtttatgttgttgtaggatttgtaggagttgggcgttggtttatttgttgttttttatttttgattttgttaggttaatagagttaaatagtaatttagtattgaattgggatttggttaattaaaagttggggagatagtagatatgagaggagggaataagttggtaatggggtagattagaatgttgtcgtagaaattaggatttttgatttttgttttatattttgggagggattatgagtgatttaagtttattatttaatttttttgagatagtttttttatttgtagaatgagaatatgggacgaggtgagtagttttgaatttttttttagggagtgttagaacgaggttagtttgtttttatgttatgtggttttaggtatttatagtgaagttttaaaattagtggatgttttttatagtgttttttagttgtggtagtttgtgtttttaaggattaatttttttatttttgaggttttagaataaattttggtagttatttttttttttagattttattttagaaaagtgtatttgttaatttgtatttagtaagaaataatgaatttttttttttattttttttatttttattttttatttttttgagacggagtttcgtttttgttgtttagtttgggatgtaatggcgtaatttcggtttatcgtaatttttatttttttggtttaagcgatttttttgttttagttttttgagtagttggaattataggtatgtgttattacgtttagttaattttgtatttttagtagagacggggtttcgttatgttggttaagttggttttaaattttcgattttaggtgatttgtttgttttagttttttaaagtgttgggattataagcgtgagttattacgtttggtcgttgttgttgttgttgttgttgagaaggagtttcgttttgtttttggattggagtgtagtggcgtgatttcggttttttgtaagtttcgttttttaggtttatgttatttttttgttttagtttttttagtaggtgggattataagcgttcgttattacgttcggataatttttttgtatttttagtagagacggagttttattatgttagttaggatggtttcgattttttgatttcgtgatttgttcgtttcggttttttaaagtgttgggattataggcgtgagttatcgtatttggcgttttttttattttttattaattaaaaatatttatagttgttaattagagtttttgattagtatgagataattaggtttttatataagttgatataattttagttaaaagtaaatatatttgaggttttaattagtttaggttattttatttggtaaatgtatgattttcgttaggttttttgaaatattgaaaatagtatacggattttttattgttatttttttagatttttaaaagtgtttaattgttgtaggatttaggaagtaggaaaaagatgtgggaaaataaggataaattagtttgtatgttatttatggtattagttattttatttggcgtgttggtaggggaggtattatttattggattgattttaggttgttgggatggaagggttattgtttgtttaggaataagttaagggtagtgtgtcgggaggaaaggaggtttaggtttgtgttttttgtttgtatgttaggtattttgaattatcgtatagtcggaatggatatgtttttggtttgtgggttttataagttttgtaaattttttgttttgtaattttgttaaattttaggttatttttttaggttattttaggagtgttaggtttagtttttttttaagagtagtgggtgttggagaaattggtagtaggaatagggttttttggttttagttttgtgttttaggaaattttgagagaattttttttttatttagaggaagagggagagggtattttaagtttatagttagtgtttgaattagaatttttggtttttggtttagtgttttttttattgttttttgtatttttgttgttttggtttagtttaggttggtggttttttttgttttttagagtttgaaggtagtaattaagttttttgggggttgtttttgttgagagaggggttttttttttttatattatttagttttagggcggtgtagttagattttataagtggatgttatgtttaagtgagaagggtggggtttggtacggaggtgggggtgtgggagataaacggagaagtgagaggttggaaatagataggaagttataggtagtaaatattttttgtttttagagtaacggagattggtattttttttttttattttttttaattttaggagttttttttttttagtttatttattttttatttttttggattttgtttttttttttttttatttttattattggtttttatagatttttttttatttttttttttcgttttttcggatttgttttttttgttgtttttattttttatattttttgggttattttttttcgttttagtatatttggtttttttggaaaatatttttagtttttgtgatttttattataattttttattttgggtttttttgtttagtgagaaagttgaggaaggtatttaaatattagggaaagggtaggtattggacgggttgaaagttgaaagtgaatagaaattaatagagatggagaaatgtaaaatttgagatagagagataggatttaaaaattaaaattaagagagtaagtagttataggggtagagggatagagggattgagaagtagtgttagaggtagatatagagtagagtagaggttaaggttggtaggagtattggtttagaggttgggtcgagttgtttaggttgttagatataagttttggtaggagatttttaggggaaattaagagagttaagagcggtgtggaggttttggaggtaagagatttagggatgaatgaggtagagttgacggtaggaggattgtttagtttttaattatgatttttttttttttagggtaaatttttttttatattagggggattagaagtattgtgtttagaattgggattcggtagagtagattttgaatttagttagttgggggtggtttatgggaaaggggtttaagggttgaaatatagatttagttaggaaggggaggtttatattagggtcggggtgagggtaggtttaggtttagtggaataatttgtttttattgttttttagtttttttttttatttttgttgtttgatttttaagatttatattttttttttatacgttttaaggttgggtggttgggtagtcggatgtttgggttttggtttagggaggggatttggtttgggaggagagtatataggttagatgagagattttgaggttttataggattttggcgttttagaagttatatatttaattttagtaggtacgtagaggagagggagaagttaggggtataggttttggttttttttttttttttagaaattgattgtggttttttttttttttatgaataggataaggtaggagaggatagagaatggcgggaggaggggagggttgtgttagtgatagcggtatatggggatcgtttgattttagtttgtgtttttggtatttgtggtattttttgagatataaatataacgtagggggtatttattttatttttagttagttttagtttagaggtttgggttttttttgtttttagatattaatgaaaagttaggagttatttttaattgttttatttttttttttaatagg

SEQ ID NO: 82 - DNA, 16167 bp, Artificial Sequence
  chemically treated genomic DNA (Homo sapiens)
  unsure (4003, 5529, 5534, 5553, 5570, 5573, 5577..5578, 5592, 5732)
  unsure (5837..)
tttgttggggggaaaagtgaggtagttgaggatggtttttagttttttattggtgtttggaggtaggaaggatttaggtttttaggttggggttggttgggggtggagtagatgttttttgcgttgtatttatattttagaagatgttatagatgttagaggtataggttggagttaggcggtttttatgtgtcgttgttattaatataattttttttttttttcgttattttttgtttttttttattttattttgtttataaagagaggaggaattatagttaatttttagaaggggaagaggggttagagtttgtatttttggttttttttttttttttacgtatttgttgagattagatgtatagtttttggagcgttaaggttttgtggagttttagggttttttatttagtttatatattttttttttaagttaaattttttttttgggttaagatttaggtattcggttgtttagttatttagttttggggcgtgtaggaggaaaatgtgagttttggaaattaggtagtaggagtggagagaggagttggaggatagtgaaaatagattgttttattgggtttgggtttgtttttatttcggttttggtgtgggttttttttttttggttgggtttgtgttttagtttttgaattttttttttatagattatttttagttgattgaatttagagtttgttttatcgggttttagttttggatatagtgtttttggtttttttgatatgaggggaagtttgttttgagaaggggggggttatagttaggggttgggtagtttttttgtcgttagttttgttttatttatttttaggttttttgtttttaagatttttatatcgtttttggtttttttggttttttttaagggttttttgttaggatttgtatttggtagtttgggtaattcgatttagtttttggattagtgtttttgttagttttggtttttgttttgttttgtgtttgtttttggtattgttttttaatttttttgtttttttgtttttatgattgtttgtttttttggttttggtttttgaattttatttttttattttagattttatatttttttatttttattggtttttgtttatttttagtttttaattcgtttaatatttattttttttttgatatttgaatattttttttagtttttttattaggtaagaaggtttaaagtgaaggattatggtagaggttataagagttgggggtattttttaagaagattaggtatattgaggcggggaggagtggtttaggaggtataggggatggaagtagtagagaggataggttcgaggggacggaagaggagagtgaggaggggtttgtgagggttagtggtgagaatggaggggagagaaggtagggtttagaggaataggagatgggtaggttgaagagggagagtttttgaagttaggaggggtggggaggggaggtgttagttttcgttattttggggataggaaatgtttattgtttgtggttttttgtttgtttttaattttttattttttcgtttgttttttatatttttattttcgtgttaggttttattttttttatttaggtatgatatttatttgtggggtttggttgtatcgttttagggttgggtgatgtgagagaaggagattttttttttagtaggggtagtttttagagaatttggttgttgtttttaggttttagaaagtagaaagggttattaatttgaattagattagaatagtagaggtataggaagtagtgaaaggagtattggattaggagttaagagttttggtttaggtattaattgtggatttgggatattttttttttttttttttgggtgaagaagaggtttttttaaagttttttggagtatagggttaaggttaagggattttatttttgttgttaatttttttaatatttattgtttttggagaggagttgagtttgatatttttggggtggtttgaggaagtagtttggagtttagtagggttgtaagatagagagtttataaagtttgtaaagtttataagttaggggtatatttatttcggttgtgcgatggtttaggatatttggtatgtaggtaagggatatagatttaggtttttttttttttcggtatattatttttggtttatttttggataggtagtggtttttttattttagtaatttaaagttaatttaataaatagtgttttttttgttaatacgttaagtgaggtgattggtgttatggatggtatgtaagttagtttgtttttatttttttatattttttttttgttttttaaattttgtagtagttgggtatttttaggggtttaagaaggtaataatggagggttcgtgtgttatttttaatattttagaaagtttaacggaaattatgtatttattagataaggtggtttaggttaattaaaattttaagtgtatttgtttttggttggaattatattaatttatgtgggaatttggttattttatgttggttagaaattttgattggtagttatagatgtttttggttaataaaaaatgagaaaagcgttaggtgcggtggtttacgtttgtaattttagtattttgggaggtcgagacgggtagattacgaggttaggagatcgagattattttggttaatatggtgaaatttcgtttttattaaaaatataaaaaaattattcgggcgtggtggcgggcgtttgtagttttatttattagggaggttgaggtaggagaatggtatgaatttgggaggcggagtttgtagggagtcgagattacgttattatattttagtttagagatagagcgagatttttttttaataataataataataataacggttaggcgtggtggtttacgtttgtaattttagtattttgggaggttgagataggtagattatttgaggtcgggagtttgagattagtttgattaatatggcgaaatttcgtttttattaaaaatataaaattagttgggcgtggtggtatatgtttgtaattttagttatttaggaggttgaggtaggagaatcgtttgaattagggaggtgggggttgcggtgagtcgagattgcgttattgtattttagattgggtaataagagcgaaatttcgttttaaaaaaataaaaaataaaaataaaaagaatgagaaaaggaatttattattttttattaaatgtaggttggtaggtatatttttttgaaatagagtttgagagaagaaataattgttagaatttattttgaagttttagaaatggaagggttggtttttggagatatagattattatagttagaaggtattgtagagagtatttattggttttaagattttattgtaggtgtttgaggttatatggtataaaggtagattggtttcgttttgatattttttaagaaaaagtttaaagttgtttatttcgttttatgtttttattttgtagatgggaaaattattttagaggagttaagtaatgggtttaggttatttataattttttttagaatatgaagtagaaattaggaattttgatttttacgatagtattttagtttattttattgttaatttattttttttttttatatttgttatttttttagtttttgattaattaagttttagtttaatattgggttattgtttgattttgttggtttgataaggttaggggtggagagtagtaagtggattagcgtttagtttttataggttttatagtagtatgggttaggttagaggaggatatttggtttggggttttttagtgtatttataagggatatgtatgattggttggggaagaatagttgtttttatttgtggtagttgtagaagggaataaggagttgagttgagattggtttgttttttaagtttttaagtgttttgggttaagttattgtttttttttaagttttggattttttggtatanaatgatggattttttttgaatgttttttaaattaatttttggtttaaaatttttatgatttttgaagttttagttgtttttattttttgtttgtttgttgttgtttttttgagatggagttttattttgtcgtttagtttggggtcgtttagtatagatgtgattttagtttattgtaatttttgttttttaggtttaagggatttttttgttttagtttttcgagtagttgggattataggtgcgtgttagtacgttcggttaatttttttatttttagtagagatggggttttattatgttggttaggttggtttcgaatttttgattttaggtgatttatttattttcgttttttaaagtgttggtattataggcgtgagttattgtatttggttagttttagtttttgtatatttaaaaatggggtaataatgttttttttgttttaatataaggatttttgttataatttaatggaaaaatcgatatgaaagtgttaaaggaatatgatagattattgttattattattagtataagtaaatatttaaagtaagtaagaaatgagggaattaggcggtagttaggaaggagagaattagaaatagaaatagttattttataaaaattatgtcgtttatgtattgattattttttgtggattaggttttttttgtatatgtttttttatttagtttttagaatttcgttagttaggtgtttgatttttacgggaagattaggttttaagagtttaaatatttttttttaggtattagggtattacgtaaaaaattagtaagtagtggggatttatatttatttttgtttgattgaaagttttgtttttttttattatttaattgttttggtgttcgttttgttttttaatattattttggtgtttattataagaggtgatgtaggaagaataagaatattgaggttttttttttttggtaatggttgtaggtgaggggttgtgtttgttttgtgttgtgggaaagggggtgaaggtttagttgtggtgggaggaggttattggggaggtagaatgttttattgtaagagggtattgtaaataggaaatgagagggaaggagtgtaagttggatatttgggtttttttgggaggggagatgagtagaaggggagggggaagggatgagagagttaggttttgttttagaagaggattttagggattataggattaggttaggggttagatagatatttaggggattaggaatgtgtgaagtttagatgttttagaggagtgttttaaagggaaatttaggggaggggggagtaaagagaaggttaaatgttagataattagatattttgatttgcgggaggagattttatttttttttttttttttttttttttattttattagggttgtgataagaagtttgagggaatttgggggagattaggtttggtagaggttttaggttagggtgatgatgtaatggggtttgggtaaaaggttaggggggtggggtgggggttcgntgttnttttttttttttttgtttnttttttttttttttttnttnttgnnngggtttttttttnttttttttttttttttttttttttttttttttcgcgtttttttttttttttttttttttttttttttttttttttttttttttttttttttttttgtttttttttttttttttgttttttttttttttcgtttttttttntcgtttttttttttttgttttttcgtttttttttttttgtttttttttttttttttttttttttttttttttttttttttttttttttttttttttcgtttgttnnncgtttttggtgtgagaaaagtaagaataaaatgagggtatattttaaaggtaagttaataataaatgaaattatattaattttttaaaaattatttaataagttaaatttataaaattaattaagattttatattatttagagaaaaggttaaaaatttgttaattaaagaatgaagagtaagggtgttaataataatataatgtaattttaaaaatattggttttaagaaatatattaataatttaatgaatgaaaataattttaaattattattattatattttaatgatagagatgggattttattatgttgtttaaggttggttttaaatttttggttttacgtgatttttttattttagttttttagagtgttgggattataggtgtgagttattatatttaatttttttttttttaaattaattttattttttttttaatttttttagttatgaaaatgtttatgtttattttttaaaatatatattttgttttttatattaattagggtttggttgtagagaatagaatcgattttagttagattaagtagtaaaggatttattattagggtattaaatggatggattatagaattttggggaaggttgaagaaataaattttagattggatttttagaaatgatttttaaagattgttaagggaggttagtcgtggtggtttatatttgtaatattagtattttgggaggttaaggtgggtaaattgtttgagtttaggagttggagattaatttgggtaatatagtgaaattttgtttttattaaaaatataaaaattagttggggtatggtggtatgcgtttgtagttttagttatttaagaggttgaaatggaaggattgtttgagtttaggaaacggaggttttagtaaatcgagattttattattgtattttagtttgggtgagagagtgagattttgttttaaaaaagaaattgttaattaggtcgggtacggtggtttatatttgtaattttagtatttttgggaggtcgaggcgggcggattacgaggttaggagatcgagattatttcggttaaaacggtgaattttcgtttttattaaaaatataaaaaattagtcgggcgtagtggcgggcgtttgtagttttagttatttggggaggttgaggtaggagaatggcgtgaatttcgggaggcggagtttgtagtgagtcgagatttcgttattgtattttagtttgggcgatagagcgagatttcgttttaaaaaaaaaaaaaaaaaaataaaaagaatgagaaaagaatttatattttttattaaatgtaggttgtagggtatatttttttgaaatagagtttgagagaagaaataattgttagaatttatattgaagttttagaaatggaagggttggtttttggagatatagattattatagttagaaggtattgtagagagtatttattggttttaagattttattgtaggtgtttgaggttatatggtataaaggtagattggtttcgttttgatattttttaagaaaaagtttaaagttgtttatttcgttttatgtttttattttgtagatgggaaaattattttagaggagttaagtaatgggtttaggttatttataattttttttagaatatgaagtagaaattaggaattttgatttttacgatagtattttagtttattttattgttaatttattttttttttttatatttgttatttttttagtttttgattaattaagttttagtttaatattgggttattgtttgattttgttggtttgataaggttaggggtggagagtagtaagtggattagcgtttagtttttataggttttatagtagtatgggttaggttagaggaggatatttggtttggggttttttagtgtatttataagggatatgtatgattggttggggaagaatagttgtttttatttgtggtagttgtagaagggaataaggagttgagttgagattggtttgttttttaagtttttaagtgttttgggttaagttattgtttttttttaagttttggattttttggtataaaatgatggattttttttgaatgttttttaaattaatttttggtttaaaatttttatgatttttgaagttttagttgtttttattttttgtttgtttgttgttgtttttttgagatggagttttattttgtcgtttagtttggggtcgtttagtatagatgtgattttagtttattgtaatttttgttttttaggtttaagggatttttttgttttagtttttcgagtagttgggattataggtgcgtgttagtacgttcggttaatttttttatttttagtagagatggggttttattatgttggttaggttggtttcgaatttttgattttaggtgatttatttattttcgttttttaaagtgttggtattataggcgtgagttattgtatttggttagttttagtttttgtatatttaaaaatggggtaataatgttttttttgttttaatataaggatttttgttataatttaatggaaaaatcgatatgaaagtgttaaaggaatatgatagattattgttattattattagtataagtaaatatttaaagtaagtaagaaatgagggaattaggcggtagttaggaaggagagaattagaaatagaaatagttattttataaaaattatgtcgtttatgtattgattattttttgtggattaggttttttttgtatatgtttttttatttagtttttagaatttcgttagttaggtgtttgatttttacgggaagattaggttttaagagtttaaatatttttttttaggtattagggtattacgtaaaaaattagtaagtagtggggatttatatttatttttgtttgattgaaagttttgtttttttttattatttaattgttttggtgttcgttttgttttttaatattattttggtgtttattataagaggtgatgtaggaagaataagaatattgaggttttttttttttggtaatggttgtaggtgaggggttgtgtttgttttgtgttgtgggaaagggggtgaaggtttagttgtggtgggaggaggttattggggaggtagaatgttttattgtaagagggtattgtaaataggaaatgagagggaaggagtgtaagttggatatttgggtttttttgggaggggagatgagtagaaggggagggggaagggatgagagagttaggttttgttttagaagaggattttagggattataggattaggtaggggttagatagatatttaggggattaggaatgtgtgaagtttagatgttttagaggagtgttttaaagggaaatttaggggaggggggagtaaagagaaggttaaatgttagataattagatattttgatttgcgggaggagattttatttttttttttttttttttttttttattttattagggttgtgataagaagtttgagggaatttgggggagattaggtttggtagaggttttaggttagggtgatgatgtaatggggtttgggtaaaaggttaggggggtggggtgggggttgggtggggatttgaatagtttagaataatagtcggggtttaattatttttttttttttttatttttaagttttttagataaaggagaatttgtttttttttttagttgtattagttagattaattttttttttttaaaaattatagggattgagtagagattagttaattgttttatgtgtaaaaataggtcgtttttgatagaattttttttaaattttgagattttggggttggggtgggggtgagtagtaggaagtttttagtttagagatgtagaagaaaaaggattatattagttattgtggaggattaggaatttggtatttatggtttagtttaggagtaattatttattttttttgttttttaattttttcgttattttatatttaaatagatatttttggttttaatgttgtttttattttaatttttgttttttaagtttgttagtattttattttttaggtattcggggttcgggtttgtttattattgtgttgagttgggaataaggatttttttttgagatttttagggttttgagttttttattttgacgtttttggttttacggagttttcgtttttttagttttcgattttagttttagaagtttcggttttagtatagttttagtcgattagttataggaaattagttttttttttttttttaagagttagaggaagagggaaatcgtttatttttttttacgcgcgtatatatttttttcgatatattttagtattcgtttttggttgagttcgtttttagttttagggttttagtgttagggttttcgtattcgtttttagttttcggattttttcgtttgaatagagattgggggcggagggaggagtaggagatagaggagaaaggagagggagtcgtcgttttttttcgggttttttttcggtttgagttgaggggggaggggaggatgaggttggtttttatttaatttttcgatttttttagtttttgattttttttttattatacgtagtttattcggtttttattcgttttttcgtcgtataatggtttttacggatttcgaggttttttggagtttttaaaagtttttttcggtttttgcgttttttttgcgtttttattcgttttaggttttagtagtttatagattttagttagagatttttagttttttatttacgcgttttttttttttttggttcggagatttttgtttagatttttttagtttcgtgttttttttttatcggatatatgtttttttattgattttaaacgttagggtttttttttattcgttacggtgttttttttattttagcgcgggtttttaattttagttaggttttttaattgtagttttattttttataaattttatttttaaatttaagttttggttttttttagattttagtcgcgtttttagtttttaggcggtttttttatttttatttcgtttttagttttttttatttattcgtttgttttcggtcggtaaaattttattgagaattcgaagaaggagttcgggggtttcgagagtattgttggggttttcgcgtttaagttgaagttttcgattttgggtggcggcggtagtagtagtaatagtagcgtaagtagcgggggtcggcgtcgggggtttttagcgtagttgtacggcgtggagaggggattttggcgttcggttttttatagcgttcgtttttttttgttttggggttatcgattcggagtcgttttttaaattttttagaggcgaatgatttaacgcggggaggagtttgttaaattttcggttgagtttttttttcgtttgtcgagggggttggcgggggggtatttttgggtttttggaattttgagttcgcgttttttatttttaaggggcgtgggggggggcgtatttttttaattttttttttttagttttagttggaagtcggttgtttggattgggttagattgggcgggtttgggtttttttttttttttttttgttttttttttttttttttttatttttttttagatgtataacgtaaacgttcggaaaacgagtcggaaaagggagcggagaattttttaatgaggaaaggaattatttttggtgggcggaggaagtttgtatatgtgtgtggggttttttttagtgttttagggaggagattttggggtttaaagagataggagatttttttggcgttcggttaattgggatttttttttgtttttcggggtcgtcgggtgtttgggttttggttagttggatttgggatataatagttgaggtatagagatagcgttcgtagttagtttgttagaggatttatacgggttttttaagtttcgttgtttttttttttaagtttgttagtattgaaaatttaggagtttggggttatttattaggaggattttgttttagtttgttttttttttggttttagggtatgtaaatttttgttgagttttttttttggatttgatagttgattaaaagtttgcgagtggttggttttttagtatttgtttgattaaattggtcgggtttttataaatttggagaattgtgagaggtggtggtggtggtggaaagttttgtaaagggatttaatttttagtttttaatggttgtaaacgttgggagttttggttaggtacggtggtttatatttgtaattttagtattttgggatgtcgaggtgagtagattatttgaggttaggagtttaagattagtttggttaatatggtaaaatttatttttattaaaaatataaaaattatttagatgtggtggttcgtatttgtaattttagttattcgggaagttgaggtaggataattatttgaatttaggaggtagagattgtaatgagtcgcgattgtattattgtattttagtttgggtgatagagtaagattgtatttaaaaaaaaaaaaaaaaaaaaaatttaaaaattaaaaattaaaaaaataatgggagcggaaagttaggattttattttttttagatttttttgtggaagtagaggaagggattttagaaagggaaggtagtgattttttgtttattttttttttaagtttaggttttgtgtgatgagattattttttaggattttagtttttattttagtttgggggaggggattataagtttttttagttttttttttttaggattttttattttttagaataatattttgttaataatattttgttaattttgttttttttgttttttagttttttgttttatttcgggttgaaaggtttagaataagagtgtttagagttaatgttttttttttgttatgatttttttttttattttgttattttattttttgttttaaattatttatttgtttttttaaaagtttttttttagagttagttgtagtttaagggagaggttggttggttagattgtggggtaatgttggttcgtattttatttttatatttgtaagttttgatttttttttaggtgaggaattagggaatttttgggttaggatttttaagtttagtattgttaaaaaggtaatttttaggtgagagttatttaagttatgggttgggaatttttttgggaggagaagggttgaggtttgattgttttttagtttagtaaaatacgtgtgtgaattaaatattttttttttttagtttaggtaaattttttagatttttttaggatttgggagattaggggtgggggtggggaggggtgtagggaaggaggtgtgtgatttagttttttttaggagttttggtgggggataggggatatagcgttttgttttagtttttttttttattttatttttagttttggttaatttaaataggttttttttttgtttattttttgtttttgtttatatcgggagttttttagttattttttggttggtttttttatttttttttaatatttttttttttttggttttttttgtttttataagtttttttttagtggttttaatattttttgtttttttttttattatgtttgtttttgtttgattttttttttttttgttttgggttcgtttttaatttggggtttttttttaattagagttattttagtatagatttttaggtttggaagttgatttagaaaggttagtgaggaggggatagaagttattagtttaatttttttttttagaagaggaaatgggtgtagagagatgaagtgatttgtttagggttatatggttagttagttagcggtgagtttagaatttaagtgtttagattttagatttagtgtttttttttttaagtttattgtttttttaaatgatttatttttttttagttttttttttttattttgtatattttttagtttttttttggttaagtttgtgtgtttttaagtgtttttgtttttttttttaaatttgatttttttggtattttttgtttttttattgtttagtaggaatgatttgttgtgatgattgattattattaattatggtttgtttgatggagaggaagaagggtgaagggtaaggttaggatatttagtaggtttttgttgtcgttagtttgtttgttttgaaggttggagttttagaattataagagtgaatttttatagaggagtttaggatataggtgtaagttttaacgttaggggttatgttgaattttagtagtgtggaagaggggtggggagtattgataatggtttatttagtatatgttgtatttttggttttgggtttgatttttaatttgtttttattttatttattttaatttatttagtattgaaggtattatgatttttattttattgttaggaaatcgaagtttaaaggagagaagtgattaagcgaaggttaatagaaaggggtagaggtaaatttaaatttaattttagtagattttagagtcgttgttttttttattgtaatgttagttttgtaaatcggttgggtttttatagaggtatgggggaagattttagagtaggaattataatttagatttattgtttttggggtggggtgggggaagattgggtatataatttattaattttttgaaattggatggaagtttttgtttatatgtatgtgatttttttggggtgagatttagtggtttttttaagatttttaaatgtttggaaattttgagaatattaaggttggatgttttggttttaagaaatagatttaggttttgttgggttgtaaaaagtttgattgggtagaggtggtagaggttgaggtgtttatgaaataaaattttttaggttgggtgtagtggtttatgtttgtaattttagtattttgggaggttatggtgggtagattacgaggttagaagtttgagattagtttggttaatatggtgaaatttcgtttttagtaaaaatataaaaattagttacgcgtggtggtgggtgtttgtaattttagttatttgggaggttgaggtaggagaattgtttgaattttgggaggtagaggttgtagtgatttgagattgtattattgtattttagtttgggtgatagaacgagattttattttaaaaataaaataagataaaaataaataagtaaataaagaagttggattttatagagggaaggaaggtgggatatttaggaaaattatgaagttgaaggcgggggtggggggatttttagaagtagaataggagtttagttatattaggatttagagattgttgaagttggggagttgttttgtgtgtgtgtgcgtgtatgtttaagaaagggaaattggaaagtataggagtagattatttgtatttttaggttttgttgtttttttgatttaggtttttgtttagaggaattgagggttttattatttgtgagttatttttattatttttattcgttgtttgatttaggagaaattttttttttgtgttttatgtttaaaataaatttaggttttttttttttttttatttttagtttgtatagagtataggaggggtggatggaagatgtttattagggtgataaaagtagattttagtaataagattcgtgggttttattgttgttttaggatttcgaatttagtgattaagattgtgattagagttagatgtcgtggtttacgtttgtaattttagtattttgggaggttgaggcgggtggattatttgaggttaggagtttgagattagtttggttaatatggtgaaatttcgtttttattaaaaatataaaaaattagttgggtatggtggcgggagtttgtaattttagttatttaggagtttgaggtaggagaatcgtttgaattcgggaggtggaggtggtagtgagtcgagatagtattattgtattttagtttgggcgatagagagagatttagatttaaaataaataaataaataaaaaaaatttgtgattagatatttttgtggagattaaattgggagtttttttaggcgagattaggttggagaggtatatggagatagggattaggggatgggtattgataggaaaggagtagagttaagaggatattgggatataagatataagatttaggaatttagattaagtagattaatgggaaggaatttttttttatttttgttaatgttttttttttttaaaagttttttagttttttttatttatttatttatttatttatttatggtatatttagaggtattagaat

SEQ ID NO: 83 - DNA, 9666 bp, Artificial Sequence
  chemically treated genomic DNA (Homo sapiens)
ttttagagttgagtagaggatatggggtatttgtatttagtgtttttatttgatttttttagggttattttttatttgttttttttttgggtttttattgtttattgtttaattttagtttttgttgtagttgaagtttagttttatttgtttttggtagagatggatataagtcgtatatatatttatttggagaatgatttttgaaatttgaagtttttttttgtttatttttttttacgattttttatttagattatttttttttggattgaatgaatgtaattttatatttttttttttatttatttttttttttttttgaggttttttttagagttagttttaattagtaagttttaaattgattggttgggttaaatagggttggaagttgttgagttgttaggggttggatgagggttgagggaggatatagagtgagtagataaggttttatatattgggagatttggttgggttttaagagagggggttggtggtggtgtggttaagttttaaatgttggtttgaagttagtgtttaaagaaagggggtttttgagatagtttaaatggttttttttggtaagtgattttttagttttttttaagtgttaagggttttttttggatcgttaaagatcggagcggttaagttgtttttttattgaatttttttaattatatttatgtttttttttttttagttatttttatggtttaagttttgattataattagaatttagaggtaggtagaaggattttagtgttggagaggtgagtgaagtaaaaaagtttttatggtgtgtatgttgggacggaaaagtttgattttgggatataagttttaaggttttgttgttagatgaggtggagggagaagttagttttgaagtgtgtgttttggaagtgtttgtttgtaagttagagataatagttgtaaaaagtgtgatttgagggagttgaaaaatattgattttaaagtggggaagaagatgttgaaaagggaaggagttggagaaagttttagtttttatttatataaaagttaaagggttaaaattttggttggatttggatattttttaacgtttaaaattttggaaatttttataaagattattaattttttatttttatatttaatttatttaaaaagtttagttttttagttatattagttatatttttttttttttttttttttttttgagatagagttttattttgttgtttaggttgaagtatagtgtattaatttattttatggagtggagtggataatttattttatggattattattttattttgttagtggtatttttagaagtataaaatttttaaatttttttttttttttgaggtagagttttattgtgttttttaggttggagtgtagtggtgttatttttgtttattgtaggtttcgttttttgggtttaagcgatttttgtgttttagttttttgagtagttgggattataggtgtgtattattacgtttagttgatttttgtatttttagtagagatgggtttttgttatattggttaggttggttttaaatttttgattttaagtgatttattttttttttttttaaagtgttgggattattatgtttggtttggaaattattttgaaataattatagattagaggaagttgtaaaaatagtatatgaagttttgtgtattttttatttagttttttttaatggtgatattttatgtaattgtagtataaaattaaaattaaaaagttgatattggtatagtattgttaattggtttgtagattttatttagtttttattattttttatatgtatttatttgtttgtttgtagttttgtgtagttttatattttgtatagatttggataattattattataattaagatataaaatttattattataaaggaatttttttgtgttatttttttatgtttgtttttatttttttttatttttgttttttggtagttagtaatttggtttttatttttatagttttgttattttgagaatggtatgcgagtggaataatatagttttagtattttttgtttggagatagggttttattttattatttaggttggagtgtagtggtaagattatggtttattgtagtttttattttttgggtttaagtgatattttcgtttagttttttgagtagttgggattatagatttggttaatttttttattttttgtagagatgggggtttttttatgttgtttaggttggtttttaatttttgggtttaagtgatttttttgttttggttttttaaagtgttgggattgtaggtatgagttattgtgtttagtttagtattaatttttaatttaattaatttttaagtttttgattgaaatataagaagttttttaatagtttatttattttaatattgagtttatcgtattttttggatttttttagttttttttttttttttttttttttgatgtggagtttttgttatttaggttggagtgtagtggtgttattttagtttattgtaattttcgttttttgggtttaagtgatttttgtgttttagtttttggagtagttgggattataggtattcgttattatattcggttaatttttgtatttttagtagagatagggttttatcgtgttggttcggttggttttgaatttttgattttaggtgattcgtttgtttcggttttttaaagtgttgggattataggcgtgagttatcgcgttcggtttcgtttagttttttaatttttttttttatttacgatattattttttattttaatattttggttttatttttttttgagagaaatttatatgtttaaatttattaggttggtttagtacgtttttgtgtgttttttttttttttttgtttttttatttatagttaggttaattttgggtggtttttttttttttttttttttgatttttttttttgtggtggtgaggtgattttttaaatatttggagagaggaggttagaagtagatttttggtatttgattttagttttggattatagaagttagtggagtgggaatggagataggtagaagttgtaggtgtagataggaggtagtttgggttttaaaggtattttgagttgggtcgggggcggggggatttgggtagggagttagtagttttagttttgttttaattttgtaattttgtatttttatgttagtttttttttattgtttggggttttgagatattaaaaaggatggggagggtatggtgaaagtagaattttggtgttagttttgttgatagtatatgtatttttttatagtatttgtttagagatgtgttagtgttttggaggggatagttataggtgtagtattggaaaatagagggttagatttttaaatgtttgttaatttatttaaggtaaagattgttttagggtagtagagtaagaatttattttttttttgtttttaaagaagtataattttgaataatgaagtaggaaagatagaatataggaagaggaaggaggtaggatatttattggaatttttaagaaagggaaagagaagaaagaatcgtaagaatatgatagtgtttgaagggtagagataatattagaaatattgagaaatattttgagaaagattttaagtgtggtagagataagaatgatgataaaatagaatttgggatgagataaaattagatagtgagagagagaagggaagatggatagatgtatatttataagattaatattagtaagtaaggggagtaggaaggggaagtgggagtattcgaggtttttattatgttaaattattttttgtttttttttttggttttatttttgtatcggagttataaatagtagagagttggaaagtgtttttttatttttttgtttttgttttagtttgagggaaagggagaggaagagggataggttaatgggtttttgtggagattttattttagttttatttaggttttgttgagttagtttaggattttgtttttttttatttttttttatggataggaaatgtgtagttttgggacgggtttggtagttggggatattttttatatttttttgttttttgggtttagttttttttatttttgttttttttgatatttatttttttttttattgtttaattttttttttttgtaattatttttagtcgtttttttttttttttttattttattttttgttaattaattttttgtttttttttttttttttttattttttttttttttttatttttttatttgtttttcgtatttttcgagtttttttttttttttttgtttttttttttttgtttttttgaattttgacgatgtggttagtattgttgtggttattgtcgggttgggggcgggggatgggataggatgggggagggtagcggtttgattttaatagtagaaagagtgttttatgtgattatgggggaatagggagtattaagatgttacgttgtatttaggtttaggacggttttttttttattttttttttatttgtatatttttttttttaggttgttttttagcgtttttttaattttttattttttatttttttttttttgttttagtttttttttttttatttgtattttttttttttcgtattttaaggcgtcgtttttattattttcggggtggggatggggttgggggagaaggggaggagagcgtcgcgtaggggcggagtcggagacggtgttgggtttggggggcgtggtggtggggggttagtaaggttagtttttattttagttattagtttgggtatttttttggagacgggtttgggtttttatttgtcgcgggagcgaggggcggggtcggaggcggggtttgagtggcgttttcgggagaggaggcgggagtcggagtgggcgtcggagttgcggttgttgtagttgttttagtcggtgttggggcggcggggtggcggagcggcgggcgggcgggagggttggcggggcgaacgtttgggagacgtttgaaagattaacgagattttggagattagagacgcgtttggggggatttggggtttggggcgtgcgagattttttttgtattcgttgggagttcgcgtagggatcgttttatggtcggggttcggagtcgcgatttttggggggttttcgggatttgttatttttttggttttttgttcgtcgaattgttttttttacgggttgtcgtttttaatttggacgtgatgggtgttttgcgtaaggagggcgagttaggtagttttttcggtttttttgtggttttgtatcggtagttgtagtttcgattttagagttggtgagttatcgtattcgtttagagtcgttatgttcgagttatagatcgtttttttttttattttgtgggtttttttatttttttgttttttagttttattaagatttagattgtttatagatattttatattttaatttggagttttgttttatttggtttgcgtttgaagttgtatttttcggttttgagattagtattttgttttagggatgagttggaaagtaaggtttttgttttggtagcgaattattttttttttttgggttttttttttaatttgtatttttgatttagttttagggtttttggtttttttgttttttttaagggttgaattttttaagggagggagattgtttgtttttgtttagaatgggaggagatggaaaggatatagaagttgagggtgttatgagagggatgtatgtagggtagattttagaaataattttttgttagagtattgttatggatggaatgagggtagtagggtattggaaggttaggagagagtttttatttttgtggtttaagattacgggaagattgggagaggatttgtaggtttgttaatttgtagtaggtggtttggtgatagagagtggtagtaaattgaatttttaaagtattagtagtagtagtagtagtcgtagtagttgtagtagtgagagagatttaggaaggatgttggttaggttgttttttttttttttttttagtaaatttttaattttaggaattttagtagttgggaagggttaggaggagtaaggggtggaggataattttaattttttttaattagtttaggatttatgggagatggatatatttttgtgaggggtttgtgattggttatgttgtttgtatttttggtttttgttatatgtttgattgtaaaaagggaggttagaggtgaagaaagttttttatttgtttttgttagggggtttttttttttttaattagtgtttaagttatattaagtatttattattgggattaatgttgtttattgggattgttttttgtttttattgtcggtttgggggtagggggtagggataagagtttatttttttttatttgtttggggagtgggggtttagttttaatttttttttttttattatttttattatttggtagtagggtcggtggtttttaaaattttgggagagatagaaagtaacggattttatttttttttttgtttattatttgtttttttatttatttttgttttttttttttttttttttttttttttttatttgttagagttcgaggattggaggtttttttaggatatgttgaattttttaagttatttttaggtaaattttaggttatttttaatagtttggttttttgttattttttttttttttttgaaggtggtttttggtttcgttttttagagttaagttggggttttttttagagggtttgattgttttattttgtttttgttttagtagggggtgttttgttgttggggggcggggggtatgtgagaggttaggtatttgtttagtttttagtttttgagttgtaggtggtttgttttagtatttattgatgaaaaaaattttttgtttgttttgatgttttttagtttagttttgggatgagattttaaggtttaatttttgttgtgtggttttagttttatttattttttttaattgtaaaaaggatataaatatagtattattatatagggttgttgtgtagattaagagtttttaatatatataaaatgtttagaatagtgtatagttcgtagtgagtgttgtgaagtgttagtagtattgttatttttgtattgtgatttatagagcgttttatagagattttggatttaaaggtttggttagagggtttttttggttgagttagttttttaggttaagtattttttttagagggttatttagattgagaggggttaaagaggggttggatttgggttggggttttggagtgtgtggagaatcgagaagtgtagtggtcgtgggttatttttttgtttttatttagttgagtttttagggggtttttttgttttttagttgttaatatttttttttttttttttttgtttttttttttgtagtggttatattgtggttgtttagaagattggggtggttagggcgtatggtatgaagttaggaaggagtgtgtgtggttggattagaggtggagggattagagaggatgttgttgggtgtttttgttttattaaggatcgattggttttttttttattaagagcggattgggtatatttatgtatttagttttttttttttatatgggtttttttttttttttttatttttggtttttagaggagatgtgaatatagaataaggataatttatttgggtgtttagttatgtattgattagttgtgatattgggtatttttatgagtttataaaatgtgtgtgtttagtaaatatattttgatattttttatggggtaagtataaagatgaaaagatagtttcgatatttagagagatggttatttttatgtttggaggttgggggtattgttgatttgtttgaaggttgttatttatttatgtagggttgtattatttcgtttttttttttgtttagggtatttttatttttttattttttttttttttttttggggtggttttagtgttttagagataggttagttattgggtggagtgataaagtgttggagttaggtttatgtggatttgaattttagtattattgtttaatgtttttgagtgagtttttttatttgaaagataagaaaagaatttttattttataggattgttttgatgattaaatgatataatgtatgtgatttgtttattttggtgtttggtatatatgtggatagtgatgaatgttagttttttatatttttggtgtttagtttcggatttgacgttatagtaggtgttgaataaatatgatttttttgttttattagcgtttgatatagggtttggtatataatagatttttaataagtagttgaatgttaaatgtgtttttttttttttattattttttatattttttttttgttttgatattggttttgataagggatggtagttgttaagagatgaggaggagttgtgggaaggaagaatggttttttgttttttttttttattttattagagttggtatagtgttttatagatgtttgtttgtaatattgtttaatatggttttgggttttgttttttaggaagggagatggaggagaagagtgtgggagagaggcgttgaggtttgttttattgttatttttgagtttttttttttgtaaagagaggatttatggagttagttgggtgttagttattttattttattttcgtttttattttggtttgggggtttagttttaggggatttaggtagtttttatttttagtattgtgtttttttggggaagacggtttggttgtgattatggaaaattgttttgttaagaaagttgtagttgggaaagaggttgagggggaggtaggagagaagattgggtgggggtggaagggaaggagaaattatggatatggggagaaggaaggatggggaaggggatttaggatgtcgggaagagaatggggtagtattggaggtagaaggagaaatttgtttttatttttatgttagttagagtgattgatggaattttgggttggtatagtttttgggaggtggggtttttgttgggtttttgatgagggggtagtgggttcgtatttagttttttgtttggtttttgaagttggtttttgagttatattttgatgttagtttggggttttgttatttttgtttttagtatttttggtatttttggttgggttttaattggattgggttggggagtagggtagagtttggggatggggttaaggaggggatagggaaggtttatttaggaataggtgttgggaataggtagtttttttaaattagtattgttggtttggttgtttgggttggcgtgtatgtgtgtgtgtgtgtgtgtgtgtgtatttattgtgtatgttgattttttatttagatagtatgtatatgtaacgtgatgattgtatgattaagtatattaatttgtttttgttagggtttgagaaaattgatatttgttttttttttttagtttttgaatattttttttagtattgaggggttgggtttgggtagttttaatgagattgggttattttgatttttaatttttgtttttgtttttgtttttgttttattttgtagg

SEQ ID NO: 84 - DNA, 9666 bp, Artificial Sequence
  chemically treated genomic DNA (Homo sapiens)
tttgtaagatggggtaggggtagggatagggataggagttagaggttagaatgatttaattttattagagttgtttaggtttaattttttagtattaaagagagtgtttaaggattaaagagaaggggtaaatgttagtttttttaaattttggtaaggataaattaatatgtttggttatgtagttattacgttgtatgtatatattatttggataagggattaatatatatagtagatatatatatatatatatatatatatatatacgttaatttaagtagttaggttaatagtgttggtttgaaagaattgtttgtttttagtatttgtttttgagtaggttttttttattttttttttggttttatttttaagttttgttttgttttttaatttagtttagttgaaatttagttagaaatgttaagaatgttgggagtaaaagtaatagggttttagattggtattagagtgtggtttagggattagttttagaggttaggtaagaggttagatacggatttattgtttttttattagggatttagtaaagattttattttttagaagttgtgttagtttaggattttattagttattttggttggtatggaggtagggataagtttttttttttgtttttaatgttattttatttttttttcgatattttgaatttttttttttatttttttttttttttatgtttatgattttttttttttttttatttttatttagtttttttttttgttttttttttagttttttttttagttataatttttttggtaggataattttttatgattatagttaagtcgttttttttaggggagtatagtgttgggaatggaggttgtttgggttttttggggttgaatttttaagttagagtgaaggcgggggtgaggtaagatgattgatatttagttggttttatgggttttttttttgtagaaggagagatttagaagtggtagtgggataaattttaacgttttttttttatattttttttttttatttttttttttggggggtaaggtttaaaattatgttaggtagtattatagataggtatttgtggggtattgtgttagttttgatggggtggagggggagggtagagagttattttttttttttataatttttttttattttttagtagttgttattttttgttagagttagtgttaagatagagaaggggtatagggagtagtagagaagagaagatatatttggtatttaattatttattgagagtttattgtatgttaagttttgtgttaggcgttggtgagataaggaaattatatttatttagtatttattatgacgttagattcgaggttagatattagggatataagaaattaatatttattattgtttatatatgtgttaagtattaggataggtaagttatatgtattatgttatttaattattagaataattttatgagataaggattttttttttgttttttagatgagaaaatttatttaaagatattaagtagtgatgttggaatttaaatttatatgggtttaattttaatattttgttattttatttagtgattgatttgtttttagaatattgagattattttagaaagggaaggagagagtggggagatgagggtattttgggtagaaaaggaaacggggtgatatagttttgtataaataaatggtaatttttaggtaagttagtagtatttttagtttttaaatatagaagtggttatttttttgagtgtcggggttgtttttttatttttgtgtttgttttatagggagtgttagaatgtgtttattgaatatatatattttgtggatttatagagatatttagtgttatagttggttagtgtatagttaagtatttagataagttatttttgttttatgtttatattttttttggaggttaaaagtagggaggaggggaggggtttatgtggaagaaagaagttgagtgtatagatatgtttagttcgtttttggtggagaagagattaatcgatttttagtggaataagagtatttagtagtattttttttagtttttttatttttggtttagttatatatatttttttttggttttatgttatacgttttaattattttagttttttggatagttatagtgtagttattgtagagagaaaagtaaaaaaaaaaaaaaaaaagtgttggtagttggggggtagagggattttttgggagtttagttaagtgaagataaaggagtagtttacgattattgtatttttcgattttttatatattttagggttttagtttaagtttagtttttttttggttttttttaatttgggtggttttttggggaggatgtttggtttggaaggttggtttagttagggaggttttttagttaagtttttggatttagaatttttgtaaggcgttttgtgaattataatataagaatagtaatattattaatattttatagtatttattgcgggttatgtattattttaagtattttatatatattaagaatttttaatttgtataataattttatgtagtaatattatgtttatattttttttatagttgagggaagtaaatgaggttggaattatatagtaaaggttagattttaaagttttattttagagttagattaaaagatattaaaataggtaagaagttttttttattagtgagtgttaaggtaggttatttgtaatttaaaagttagggattgagtaggtgtttggttttttatatatttttcgttttttagtagtagagtattttttgttggagtaaaagtagggtgaggtagttaggttttttgggaaaggttttagtttggttttgggagacggaattaggggttatttttagagaggagggggaaatgataagagattaagttattaaaaataatttagaatttgtttggaaatagtttagagagtttagtatgttttaaaaaggtttttagttttcgaattttgatagatggagaaggagggaggaagggagggagggagtaaaggtgaatgaggaagtagatggtaaatagaagaggagatgaagttcgttgttttttattttttttaaagttttggggattatcgattttgttattagatgatagggataatggaagaagaaagattagagttaggtttttattttttaagtaagtgaggagaaatgagtttttgtttttgttttttgtttttagatcgatagtagaggtagaagatagttttagtggatagtattgattttagtaatggatatttaatgtggtttaggtattggttgaagagagaaaagttttttagtaggagtaggtgagaagttttttttatttttggtttttttttttataattagatatgtagtaagagttaaggatataggtaatatgattagttataggttttttataaaagtatatttattttttatgggttttgaattgattagaaaaaattagaattgttttttattttttattttttttggttttttttagttgttgagatttttggagttggaaatttgttaaggaggaggaaggggagtagtttggttagtattttttttggattttttttattgttatagttgttgcggttattattattgttattagtattttgagggtttagtttgttgttattttttattattaagttatttattgtaggttggtagatttgtagatttttttttaattttttcgtggttttaagttatagaagtggaagtttttttttggttttttagtgttttgttgtttttattttatttatggtaatgttttagtaggaagttatttttggagtttgttttgtatgtattttttttatggtatttttaatttttatgttttttttatttttttttattttaagtagagatagatagttttttttttttggggaatttagtttttggaagaagtaggggagttagaggttttggggttggattaaggatgtaagttgggggaaaggtttagaagaaggagatggttcgttgttaagataagaattttgttttttaatttatttttaaagtaaaatattggttttagggtcgggaagtgtagttttagacgtaagttagatgaggtaaggttttaggttgggatgtgggatgtttgtgggtagtttaggttttggtggggttagaaaatagagaaatgaggaggtttatagagtggggagggggacgatttgtggttcgggtatggcgattttgggcgggtgcggtgatttattagttttggggtcggggttgtaattgtcggtgtagggttatagagaagtcgaagaggttgtttggttcgttttttttgcgtaaggtatttattacgtttagattgaaggcgatagttcgtgagaagagtagttcgacgagtagggagttaaaaaggtagtaaatttcggaggttttttaagggtcgcggtttcgagtttcggttatgggacgatttttgcgcgagtttttagcgaatgtaagggaaatttcgtacgttttaagttttaggtttttttaggcgcgtttttggtttttaaagtttcgttggttttttagacgttttttagacgttcgtttcgttagttttttcgttcgttcgtcgtttcgttatttcgtcgttttagtatcggttaggataattatagtagtcgtagtttcggcgtttatttcggttttcgttttttttttcggggacgttatttaggtttcgttttcggtttcgtttttcgttttcgcggtaggtggagatttaagttcgtttttaaggggatgtttaggttggtggttgggatggaaattagttttgttgattttttattattacgttttttaagtttagtatcgttttcggtttcgtttttgcgcggcgttttttttttttttttttttaattttatttttatttcgggagtggtggaggcggcgttttggaatgcggagggagagaagtatagatagaaagagaggggttgaaatagaggaaggagggtaagagatgagaagttgggaagacgttaaaagataatttgggaagagagatgtgtagatagagaggaaatgaaaggggagtcgttttgggtttgggtgtagcgtggtattttagtgttttttgtttttttatggttatatagagtattttttttgttgttgggattagatcgttgtttttttttattttattttatttttcgtttttagttcggtaatgattatagtagtgttagttatatcgttaggatttaagggaatagagaaaaagaggtaagaagagagagagaaattcgggagatacggggagtaaatggagaaatggaaaaaggaaaggaatagagaggaagaaagaagggtaagagattaattgataagggatggaatgaagggagaaaagaaaacgattggggatgattataggaagaggaaattaagtagtggggaggggagtgggtgttaaagaaggtaaagatgaaagagattggatttaagaggtagagggatgtaaagggtgtttttagttattagattcgttttaggattgtatattttttatttatgaaaggggatgggagggggtagagttttggattggtttagtaggatttgggtggggttgagatgggatttttatagggatttattggtttgttttttttttttttttttttttttaggttgggatagaggtaagggggtggggggatattttttaattttttgttatttataatttcgatatagaaatggggttagaaggagagataggaaataatttggtataatgggaatttcgaatgtttttattttttttttttattttttttgtttattggtgttggttttgtgaatatatatttgtttattttttttttttttttttattatttgattttgttttattttaaattttattttgttattatttttgtttttgttatatttggaattttttttagagtattttttaatgtttttagtgttgtttttgttttttaaatattattatatttttacgattttttttttttttttttttttttaaaagttttaataagtgttttattttttttttttttttgtgttttgttttttttattttattgtttaggattatatttttttgaaaataaaaaaaaagtgggtttttattttgttgttttgggatagtttttgttttggataagttaatagatatttggaagtttggttttttgttttttaatattatatttgtggttattttttttagagtattaatatatttttaaataggtattataaggaaatatatatgttgttagtagggttggtattaggattttatttttattatgttttttttattttttttaatattttagagttttagatagtagagaagagttgatatgggaatgtagaattgtaaaattaggatagaattgggattattgattttttgtttaggttttttcgttttcgatttagtttaaaatgtttttagagtttaagttgttttttatttgtatttgtagtttttgtttgtttttatttttattttattggtttttgtgatttagggttgaaattagatgttaagaatttgtttttgattttttttttttaaatatttgagaagttattttattattataggaggaaagattaggaaagaagagagagagaggttatttaaaattagtttggttataaatagaggggtaaaggagggaggggaatatataagagcgtgttagattagtttagtaaatttagatatgtagattttttttaaggagaaatgagattagaatgttggagtggaagataatatcgtaggtgaagagggaaattaagaaattagacggggtcgggcgcggtggtttacgtttataattttagtattttgggaggtcgaagtaggcggattatttgagattagaagtttaagattagtcggattaatacggtgaaattttgtttttattaaaaatataaaaattagtcgggtgtggtggcgggtatttgtaattttagttattttagagattgaggtataagaattatttaaatttaggagacggaggttgtagtgagttgagatggtattattgtattttagtttgggtgatagagattttatattagaaaaaaagaaaaaaaaaagaaattagaaggatttagagaatgcggtaagtttaatattaaaataaataaattgttagagaattttttgtattttagttaagagtttaggaattagttaaattaaaaattaatgttgagttgggtatagtggtttatgtttgtaattttagtattttgagaggttaaggtaggaggattatttgagtttaggagttggagattagtttgggtaatatagggagatttttatttttataaaaaatagaaaagttagttaaatttgtggttttagttatttaggaggttaggcgggagtgttatttgagtttaggaggtgaaggttgtagtgagttatgattttgttattgtattttagtttgggtgatagagtgagattttgtttttaaataaaaaatgttgaaattgtattattttattcgtatattatttttaaaatgataaaattatagaaatgaagattagattattggttgttaggggataaggatggaggggggtggggataaatataaaggaatagtataagggggtttttttgtggtgatgggttttgtattttgattgtggtggtgattatttaaatttatataagatataaaattgtatagaattataaataaataaataaatgtatgtaaaaaatggtgaaaattgagtgaggtttgtaggttagttaataatattgtattaatattaattttttggttttgattttatgttatagttatataagatgttattattaggggaaattgagtgaaaggtatataagattttatgtgttatttttataattttttttgatttataattattttaaaataatttttaagttagatatggtaattttagtattttgggagggagggaggtggattatttgaggttaggagtttgagattagtttggttaatatgataaaaatttatttttattaaaaatataaaaattagttgggcgtggtggtatatatttgtaattttagttatttaggaggttgaggtataagaatcgtttgaatttagaaggcggagtttgtagtgagtagagatagtattattgtattttagtttgggggatatagtgagattttgttttaaaaaaaaaaaaaaatttaaaaattttgtgtttttaaggatattattaataaagtaaaatgataatttatggaatagattatttattttattttatggaatagattaatatattgtattttagtttgggtaatagagtgagattttgttttaaaaaaaaagaaaaagaaaaagaaatgtggttagtatgattgagaaattgaattttttaaataaattaaatgtaaaaatgaaagattaataatttttataaaaatttttaaaattttagacgttgagaaatgtttagatttagttaagattttagttttttagtttttgtatgagtggaagttgaggttttttttagttttttttttttttaatatttttttttttattttgagattagtattttttagtttttttaaattatattttttgtaattgttgtttttagtttataagtaaatatttttagaatatatattttagggttaatttttttttttattttatttggtaatagagttttggagtttatgttttaaggttaggttttttcgttttaatatgtatattatgagaatttttttattttatttatttttttagtattggaatttttttgtttgtttttgaattttggttgtagttaaagtttgaattatgggagtggttgggaggaaaagaatataaatgtgattgagggaatttagtggggaaatagtttgatcgtttcggtttttgacgatttaaaagaaatttttaatatttgagaaggattgggaggttatttattaaagggagttatttggattgttttaagggttttttttttttgagtattggttttaggttaatatttggaatttagttatattattattaatttttttttttgaagtttagttagattttttagtatgtgaagttttgtttatttattttgtgtttttttttagtttttatttaatttttaataatttagtagtttttagttttgtttggtttagttagttagtttggagtttgttaattaaagttaattttgaaagagattttaaaagaagagggaaatgagtgaagaaaggagtgtggagttgtatttatttagtttaagggaaaataatttgagtaggaaatcgtaaggagaggtgagtagaaagagattttaaattttaagagttattttttagatagatatgtatgcgatttgtgtttatttttattaaggataagtgaagttgagttttaattgtagtagaaattaaggttagatagtgaataataaaggtttagaaaaagaatagatggaggataattttagagagattagatggggatattagatatagatattttatgttttttgtttagttttaggg

SEQ ID NO: 85 - DNA, 6447 bp, Artificial Sequence
  chemically treated genomic DNA (Homo sapiens)
atatattttatagtgtttgaatttaaaaatttatattttttttgtaattttagagtaaaataaaagaatttggttggaattgttttatagagaattaaagaaattagtttgaattatttgattttaattgaatttttaaaagattgtttaatattttttaattattataagttagtttgtttttttttagtcgtttggtagtatagatgatagataattcgtttgaaaaaggtttttttagggtagtgatatttttttaggttgaacgggatttttttatcgtatagggagagtttgaagattttttttaattttttgtaaacgaatatagtttttttattttgttgtgttttaaatatttttatgttttggtttgtttgtttgtttgtttgtgtataaggatagggtattattttgtaatttaggttgtaggatagtggtttgattatagtttattgtagtttttattttttggatttaagtgttttttttattttagtttttcgagtagttaggattacgtgcgtgtattagtatatttggttaattttttatttttatttttagtagatataagggttttgttaagttgtttaggttggttttaaatttttgagtttaagtaattcgtttattttgattttttaaagggttgggattataggtgtaagttattatgtacggttaatattttttgttttttaatggtagtttaatttttttttttttgagatagttttatttttgttgtttagattggagtgtaatggcgtgattttggttttttgtaagttttattttttgggtttaagtaatttttttgttttagtttttcgagtagttgggattataggtatgcgttattacgttcggttaattttgtatttttagtagagatggggtttttttatgttggttaggttggttttgaatttttaattttaggtaatttattcgttacggttttttaaagtgttgggattataggtatgagtcgtggtgtttagtttattttttatttattttttattttttgagatggagttttgttttgttgtttaggttggagtgtaatggcgcgattttattttattgtaatttttgttttttgggtttaagttatttttttgttttagttttttaagtagttgagattataggcgtgtattattatgtttagttaatttttgtatttttagtagaggtagagttttattatgttggttaggttggtttcgaatttttgattttaggggttttgtttattttggttttttaaagtgttgggattatacgtgtgaattattgcgtttaatttttttaagtggtaaagttatatatttttattgtaaaaaaaaaaatgtagattatatagaaatgtataaattttattttatagagttaattattgtttaaagtatggttgtatattttttttaatttaataaatatatatatatatataattttatgtttattttttattgagatataatttatatattataaattattattttaaggtatataatttattaggtatagggttgtaattttagtattttgggaggttaaggagagaggattagttgagtttaggagtttgagatttgtttagatagtatagtgaaattttgtttttataaaaaatataaaaattagttgggtatggtggtatatatttgtagttttagttatttgggaggttgaggtgggaggattgtttgagttagggaagtcgaggttgtagtgagttatgattgtattattgtattttagtttgggtgataaaataagattttgttttaaaaatttaaaaaaaagaagtatagaatttagtgatttttaaatagatttataaaattgtgtaattattattatagtttatttttagaatattttattatttaaaatgaaattttatgtttattagtattcgttttttagtttttatttttttagtaagtattaatttgttttttgtttttttagatttgcgttttggatattttatttaacggagttagattatatgtgattttttttttgttggttttttttattaagtatatttttaaggtttatttatattgtagtatgtattagtattttattttttttttttttttgagatggagttttattttgttatttaggtaggagtgtagtggtacgattttcgtttattgtaatttttgtttttcgggtttaagagatttttttgttttagtttttcgagtagttggaattataggcgtgtgttattatattcggttagtttttgtatttttagtagagacggggttttattatgtcggttaggttggtttcgaatttttgattttagttgatttgtttgttttggttttttaaagtgttgggattataggtgtgaatcgttagtttgatttttttttataggtaaataatattatattgtatggttatattttattttgtttatttatttattagttgatagatatgtaggttgtttttagtttggggttagtgtgagttattatttatattgttatgagtatatatgtataagtttttgtacgaatatatgattttaatttttttgggtatatatttaggaggagaatttttgggttatatagtaattttatgtttaacgttttgtttttgttttttgagacggagttttattttgttgtttaggttggagtatagtggtgtgattttagtttattgtaatttttgttttttaggtttaagtaatttttttgttttagtttttcgagtagttgggattatagggcgtattattatatttagataatttttgtatttttagtagagacgggattttgttatgttgtttaggttggttttaaatttttgattttaggagtttttatgttagttttttaaagtgttgggattatagggatgagttattatgtttggtttatgtttaattgttttaaagaattgttgggttaggtgcggtggtttacgtttgtaattttagtattttgagaggttgaggcgggtaaataatttgagtttagaaatttaagattagtttgggtaaggtagagagatttttatgtttataaaaaataaaaaagtagttaggtgtggtggttcgtatttgtagttttagttatttaggacgttgaggtgggagaatgattcgagttcgtgaggttgaggttgtagtgagtcgagattatattattttagtttaggtaagagtgagatttttttttaaaaaaaaaaaaaaaaaaaaaaaaaaaaaaagaattattaaaatgttttgtatagtagttacgttattttatatttttgttagtaatgtgtattaggtttttagtttttttatatttttattaatttttattttttttgttttaaattttaattattaaagtaggtgtaaagggtattttattgcggttttgatttgtatttttttaatgattaatagtgttaagtattagtttatgtgtatgttggttatttatatgttattggagaaatgtttatttaaatcgtttgtttatttagaaatttaggtaggttggtttgagtgtagtggtgtttaaaattaatttttttttgagataaagttttattttgtcgtttaggttggaatgtaatggtgagattttggtttattataatttttattttttgggtttaagtaatttttttgttttagttttttaagtagttgggattataggtatgcgttattacgttcggttaatttttgtatttttggtagagacgggggtttttttatgttggttaggttggtttcgaatttttgattttaggtgatttatttgtttcggttttttatagggttaggattagaggtgtgagttatcgtattaggtcgtttaaaattaatggagtataattagttattaatatttttgttttttttttattttttttgttttatttgattagtttaaaataaataaatttaaaaaattgggtatagtggtttatatttgtaattttagtattttgggaggtcgaggtaggaggattatttgagtataggagtttaagattagtttgggtaatatagtgaaaaattattttaaaaaagaaaaattagttaggtatggtggtatgtatttgtggttttagttatttaggagtagaggtgggaggatcgtttgattttgggagtttaaggttgtattgagttgtgatcgcgttagtgtattttcgtttgggtgatagagtaagattttgttttaaaaaatttaaaataaaataaaaaaaattggttatttgtttttttattgttgaattataagagttttaaaaaatatattttggaaataaattttttattagagatatgatttgtaaatattttttttaattttttttttttttaaagataaagttttattttgtcgtttaggttggttttgatttttggttttaagagatgtttttatttttattttttgaagttttaaagggttggaattatagttagtgagttattgtatttagtttttaattttttagattttatattttagaattaaaatgggttaaatatattgttttgtaatttgtttttttttttaatagtagtttatgtatattttttaaggtttagagaaagtttttatttttttttcgttttattttttttttttttatttttttttattgttgtatagtattttattgtaattttgttattgtttattagattagttttttgttgagttttatagagtttttagttgggatgttagtgagaaattatgatagtagtggagattgttatttttttgatatgttgttagtttttggatgatgtgaaaatgtaagtaggtataggaaatgtttttaatttgtttatattttttttttgaatttttgcggttttataatttttgtaggtatattttttttttcgtttgttagtgttattagtttgttgtttttgtgagaaagtattattgtaagaggttaaagggtatgattattttttttttttattttgtttaggttgttagtaaattttacgggttttttgacgttgtttttggggttataggtttttcgagtgttggaaggatgaaggatttttgtattattgtgatggttatggcgttgttgtttgggtttttttttttcggtaggtaagggaggaggtaggggaagggatatgtgtttgtgattagagaaattgtagggtttggtgtagttggagtaaataaggagttgttttttaaaagtgggattggttttagggatatggggtttagggattttggaaggagaaaggggagagtggggaaataaaagaaataaataagtaaggggtggaggtaaagatagagaagggagtataagaaggggtagtgggttttttaaaaagatagatagggttaggcgcggtggtttacgtttgtaattttagtattttaggaggttaaagtgggtagattatttgaggttaggaatttaagatagattggttaatatggtaaaatttcgtttttattaaaaatataataaaattagtttggcgtggtggtataggtttgtaattttagttattcgggaggttgaggtatgagaattattttattttatgaggtagaggttgtagtgagttaagttcgtgttaatgtattttagtttgggtgatagagtaagattttgttttttaaataataaataaataaaaggtagatagttattgagtagttagagttgggaggagggtgttgggttttggggttatttttgcgcgttttaggtaagtttttttttttttttagttttatattttttatttaaataaatgaaggtttagtttttatgatattttaggatgttttgaattaaattttatgcggggagagaaagtagggcggaaaggatagttgggtgtgttagggcgtttgggtaggttgattgagggggaagggagttgggatttatagatgtttcgaaagattggttcggtggggtggggaggtagttttttagggattaggggagttataatttgagattgtgggaggaggcgtttgggttttatgatcgtaggagaagtgggtggtagaggcgtattcggttcgggggtatttttattttggtttttgtttgagaatttggttattttttgttttggggttttttgggtttgtttttttttttggagtttttaattttttatttttttttttttgtagagaggttaaacgggaagttgtatttttaggttttgggaagagtttttagagttttaggggggtcgggagttgttttttttatatttttagaagttaacgttttggagcggaagcgtagggtgcgggtggtttggggagcgatattcgggtgggtttgggatcggttatttgttgggtacgtgtaggggcgggggtttttcggtcgtagttgacgatttttgttttttttagt

SEQ ID NO: 86 - DNA, 6447 bp, Artificial Sequence
  chemically treated genomic DNA (Homo sapiens)
gttgaggaaggtaagggtcgttagttgcgatcgagggattttcgtttttgtacgtgtttagtaggtggtcgattttaggtttattcggatgtcgttttttaggttattcgtattttgcgttttcgttttagggcgttgatttttgggaatatggaaggagtaattttcggtttttttagagttttgaaagttttttttagggtttgaggatataatttttcgtttggtttttttgtaaaaaaggaaggatgagaagttagaggttttagagagaggagtagatttaaggggttttaaggtagagggtgattaagtttttaggtagaggttaagatggggatgttttcgagtcgggtgcgtttttgttatttattttttttgcggttatggggtttaggcgtttttttttatagttttagattgtagtttttttgatttttggggggttgtttttttattttatcgggttagtttttcggagtatttgtagattttagttttttttttttttagttagtttgtttaggcgttttggtatatttagttgtttttttcgttttgtttttttttttcgtatggagtttagtttagagtattttagaatgttatggaggttgggtttttatttgtttagatgaagggtgtggggttggaaaggggaaaggatttgtttaaaacgcgtagaggtggttttagaatttagtattttttttttagttttagttatttaataattatttgttttttgtttgtttgttgtttaagagatagagttttgttttgttatttaggttggagtgtattggtacgagtttggtttattgtaatttttgttttatgggatgaaatgatttttatgttttagtttttcgagtagttgggattataggtttgtgttattacgttaagttaattttattgtatttttagtagagacgaggttttgttatgttggttagtttgttttaaatttttgattttaagtaatttgtttattttagttttttaaagtgttgggattataggcgtgagttatcgcgtttggttttatttgtttttttaaagaatttattgtttttttttatgtttttttttttgtttttgtttttattttttgtttatttgttttttttatttttttatttttttttttttttttttaagatttttgggttttatatttttaaggttaattttatttttagggggtagttttttgtttattttagttgtattaagttttgtagtttttttggttatagatatatgtttttttttttgtttttttttttgtttatcgaagaaaaagaatttagatagtagcgttatggttattatagtgatgtaggaattttttatttttttagtattcgagggatttgtggttttaggggtagcgttaggaggttcgtgggatttgttggtaatttagatagggtgaaagaggaaaatgattatgttttttggttttttatagtggtatttttttatagaggtaataggttggtgatattggtaggcggggagggaggtgtgtttgtaggagttgtgaaatcgtaggggtttagggaggaagtgtaagtaagttagagatattttttgtgtttgtttgtatttttatattatttaaaagttgatagtatgttagggagatgatagtttttattgttgttatggttttttattaatattttaattaagggttttgtaaagtttagtagaggattggtttaataaatagtggtaaaattataatggaatgttatgtagtagtgaaaaagaatgagggaaggaaaaataaaacggggagaaagtgagagttttttttggattttgaaagatgtatatgaattattattaaagaaaagagtagattatagaatagtgtatttaatttattttggttttaaaatgtaaaatttaaagaattggaggttgggtgtagtggtttattggttgtaattttagttttttggggttttaggaggtggaggtaagagtattttttgaagttaggaattaagattagtttgggcgataaagtgaaattttgtttttaaaaaaaaaaaaaattggagaaaatatttgtaaattatatttttaataagggatttgtttttagaatatattttttaaaatttttataatttaataataaaaagataaataattagttttttttgttttgttttaaattttttgagataaggttttgttttgttatttaagcgagagtgtattggcgcgattatagtttaatgtaattttgaatttttagaattaagcgatttttttatttttgtttttaagtagttgaaattataggtgtatgttattatgtttggttaattttttttttttgagatggttttttattatgttgtttaggttgattttgaatttttatgtttaagtaatttttttgtttcggttttttaaagtgttgggattataggtgtgagttattgtgtttagttttttaaatttatttattttaggttagttaagtgaagtagagggagtggagaaggaataaagatattggtaattggttgtgttttattagttttaaacggtttggtgcggtggtttatatttttaattttagttttgtgggaggtcgaggtaggtggattatttgaggttaagagttcgagattagtttggttaatatggagaaattttcgtttttattaaaaatataaaaattagtcgggcgtggtggcgtatgtttgtaattttagttatttgagaggttgaggtagaagaattgtttgaatttaggagatggaggttgtagtgagttaagattttattattgtattttagtttgggcgatagagtgagattttgttttaaaaaaaaattagttttaaatattattgtatttagattaatttatttaagtttttaaatgagtaaacggtttgagtagatatttttttaatgatatataaatggttaatatgtatatgaattgatatttaatattattagttattagagaaatgtaaattaaaatcgtagtgagatattttttatatttattttgatggttagagtttaaagtaaaggaaataagagttagtgaagatgtgaagaaattggaagtttggtgtatattgttggtagaaatgtaaaatggcgtgattgttgtgtaaaatattttgatggttttttttttttttttttttttttttttttttttgagagagggttttatttttgtttaggttggagtggtgtgatttcggtttattgtagttttaattttacgggttcgagttatttttttattttagcgttttgagtagttggaattataggtgcgggttattatatttgattatttttttattttttgtagatatgggggtttttttattttgtttaggttggttttgaatttttgagtttaaattatttgttcgttttagttttttaaagtgttgggattgtaaacgtgagttatcgtatttagtttaatagttttttaaaatagttaaatataggttaggtatggtggtttatttttgtaattttagtattttgggaggttgatatgagaatttttgaggttaggagtttgagattagtttgggtaatatggtaaaatttcgtttttattaaaagtataaaaattatttgggtgtggtggtgcgttttgtagttttagttattcgagaggttgaggtaggagaattgtttgaatttgggaggtagaggttgtagtaaattaagattatattattgtattttagtttgggtaatagagtgagatttcgttttaggaaataaaaataaaacgttaaatatagagttattatatgatttagaagttttttttttaggtatatatttaaaagaattgaaattatatgttcgtataaaaatttatatatgtatgtttatagtagtatgaataatgatttatattagttttaaattggaaatagtttatatgtttattagttgataaatggataaataaaataaggtatagttatgtaatgtaatattatttgtttgtaaaaaagaattaggttggcgatttatatttgtagttttagtattttgggaggttaaggtaggtaaattagttgaggttaggagttcgagattagtttggtcgatatggtgaaatttcgtttttattaaaaatataaaaattagtcgggtatggtggtatacgtttgtaattttagttattcgggaggttgaggtaggaaaattttttgaattcgggagatagaggttgtagtgagcgaagatcgtgttattgtatttttgtttgggtgatagagtgagattttattttaaaaaaaaaaaaaaagtagagtattggtatatgttataatatgagtaagttttgaaaatatgtttagtgaaagaagttagtaaaaaaaaagttatatatagtttgatttcgttaagtgaaatatttagaacgtaaatttagagagatagaaagtaagttggtgtttgttggggaaatggaggttagggagcgagtattaatgggtatagggttttattttaggtgatgaaatgttttggaaatagattgtggtaatgattgtataattttgtgaatttatttaaaaattattgaattttatattttttttttttaaatttttgagataggattttgttttgttatttaggttggagtgtagtggtgtaattatggtttattgtagtttcgatttttttgatttaagtaatttttttattttagttttttaagtagttggaattataggtgtgtgttattatgtttagttaatttttgtattttttgtagagatagggttttattatgttgtttaggtaggttttaaatttttgggtttaattgattttttttttttagttttttaaagtgttgggattatagttttgtgtttggtgaattgtatattttagaatggtgatttatggtatgtgaattgtattttaataaaaaataaatatgaaattatatatatgtatatatttgttaaattggaaaggatatataattatattttaaatagtggttagttttgtaaaatgagatttatatatttttatatggtttgtatttttttttttataatgaggatgtataattttattatttaaaaaaattaggcgtagtagtttatacgtataattttagtattttgggaggttaaggtgggtagaatttttgaggttaggagttcgagattagtttggttaatatggtgaaattttgtttttattaaaaatataaaaattagttgggtatggtggtgtacgtttgtaattttagttatttgggaggttgagatagaagaatagtttgaatttaggaggtagaggttgtagtgagatgagatcgcgttattgtattttagtttaggtaatagagtaagattttattttaaaaaataaaaaataaataaaaaataggttgggtattacggtttatgtttgtaattttagtattttgggaggtcgtggcgggtggattatttgaggttgggagtttaagattagtttgattaatatggagaaattttatttttattaaaaatataaaattagtcgggcgtggtggcgtatgtttgtaattttagttattcgggaggttgaggtaagagaattatttgaatttaggaggtggagtttgtagggagttaagattacgttattgtattttagtttgggtaataggagtaagattgttttaaaaaaaaaaaaattaaattattattaaaaaataaaaaatattggtcgtgtatggtggtttatatttgtaattttagttttttgggaggttaaagtgggcggattgtttgagtttaggagtttgagattagtttgggtaatttagtaagatttttgtgtttattaaaaataaaaataaaaaattagttaagtgtgttggtgtacgtacgtagttttagttattcgggaaattgaggtaggaggagtatttgagtttaggaggtagaggttgtagtgagttgtgattaggttattgttttgtagtttgggttatagagtgatattttatttttatatataaataaataaataaataaattaaaatataaaaatatttaaaatataatagagtgaaggaattatattcgtttataagaaattgggaaggatttttagattttttttgtgcggtgaagaaatttcgtttaatttggaaagatgttattgttttgaggaagttttttttagacggattatttattatttgtattgttaggcggttggaaaaggataagttggtttgtggtaattagaaggtattagatagttttttgaaaatttagttaagattagataatttaggttgatttttttgattttttgtagagtagttttaattaaatttttttgttttgttttgaaattataaaaagagtataagtttttagatttaaatattatggaatgtgt

SEQ ID NO: 87 - DNA, 6696 bp, Artificial Sequence
  chemically treated genomic DNA (Homo sapiens)
tttgattttaggtgatttatttatattagttttttaaagtgttgggattataaacgtgagttattatgttcggttagtaatttgtttaattatatattttttataagtttttttttttttttttttttttttttttgagataaggttttattttgttgtttaggttggagtgtagtagtgtgattatggtttattgtagtttttaatatttgggtttaaaatgtttaagggatattttgcgaagtgcgtttttagggagatagtttgattttttatatttgtttgatatatattaatgtttaattaattaattatttatttaattaaaaaaatttaagagacggggttttattatgttgtttaggttagagtatagtgtatggtggtatgattatagtttattgtaatttcgattttttgggtgtaagtgatttttttgttttagttttttgagtagttgggattatatgtgtatattattatattagataattaaaaaaaaattttttttaagagatagaatttttttatgttgtttaggttggttttgaatttttgggtttaagcgatttttttattttggatttttaaagtgttggtattataggtagtgagttattgtgtttggtattagtttttttttttttttatttttttattagtgttttcggaattattttttagataaattatttatatttgaagttttgttttagagtttatttataggggaaattaagttaagattttattaagagtggggatgggggataggtaggagggaatagttaatagtttatagatatgtttttatttacggttattaggttaggtgtatatttggtggtggtttattgagaaagtttttgtaggttggatagttagtttgagattttgtttatgtttttatagagagtggatttttggttattgtttagggtaaggaggggtttttacgtttgagttcgagtagtttttatagtggttagagtgtgaaaattttttttaaagtaaatttagttgatttattaaattttttttcgggtattttggttggtatttttttattttgggtttatgatttcgttcgttttttttttagtttttttatttgttaataaatataggtaatttgttgttttaaattatttattggtattttttatgattatgagttttttttttgtataaaggtttttttttttttttttttttgagatatggttttgttttgttgtttaggttggagtgtagtgttgaggttatagtttattgtagttttaaatttttgggtttaagtgatttttttgttttggttttttatagtattgggattataggtatgagttattgtatttagtttatataaatgttttaagtataaatgatatagaaaagaatattaaagttattttgtagtagattgaatataattataaattttttttattgggaggtgggatttgtgttttttttgtttgaatgtggatgagttttgtgattgtttgattaatggaatgtggtgtagatgatttggcgttagtttttagattaagattttagtagtttggaaatttttgttttttgtttgttggaatatttgtttttgaagtttagttattatgttgcgagaagtttaagttatatggagagggtacgtgggggtgtttaggtgatagttttaattgagtttttagtttacggttaattgttagttgtgggagtgatttattttgggagtttagtttaattgagttttggattattttagttttggttgtgattcgattgtaattatgtgagagatttcgttgagaattgttgaggttaggagatttatagatacgcgagagattataatatgttgttgtttttaattatgaagttttggagtagttcgttttgtagtaatagatattggaatatatttgtaatttttttattttggagataacgattattaatatttggtttttttgtatatatatatatatatatgatttatttttgtatgtatgtatttatttatttaattttaattttttattttttgaaattgagttaagttttattgtttaggttggagtgtaatggtgtaattttagtttattgtaatttttattttttaggtttaagtgatttttttgttttagttttttaagtaattaggattataggtgtttgttattacgtttggttaattgttgtatttttagtagagatggggttttattatgttggttaggttggttttgaatttttaattttaggtgatttttttattttagtttttcgaagtgttgggattataggcgtgtttgtatatattatatgttttgtttatatatattttagagatagggtttggttttgttttttaggttggagtgtagtggtgtaattatattttattgtagttttaatttttttggtttaagcgatttttttattttagtttgttgagtagttgggattataggtgtgtattattatgtttagttaatttttaaatatttttttgtagagttagggttttgttgtgttgtttaggttggttttgagtttttgagtttaaatgatttttttgttttggttttttaatgtgttgagattataagtaggagttattatatttggttatatataaaaattataaatagataatttttaattaaatgtatataattttaattgttttttttttttttagttagtaagtatttttttttatttagttatcgggaaagtagaattagaggtaaaagaaaatgtgttgaatggtgaaattttgtttttattgaaaatataaaaaattagttaggcgtggtggtaagtatttgtatttttagttattcgggaggttgaggtaggagaattatttgaattcgggaggtagaggttgtagtgagttgagattacgttattgtattttagtttgggcgatagagggagatttcgttttataaaaaaaaaaaaaaaaaaaaaagaaaatgtgttgagaaagagtgaaaaaaattattggtttgagaattatattggcggttatataaaggtgaggtttgtgttttatgtatgtgtggaaggatatttatttttttgtgtttttgaaaatagaattaaaagtgatagatataggggagggtaaggatatattatcgagtgaagtattattgaattatttttttgtggaatatttaggtttttttagttttttatattaataataatgttgtaatgaataagtttgtaaatatatatatatatatatatatatatatatatatatattttttttttttttttttttttttagagataagagttttgttttgtcgtttaggttggagtgtagtggtataatttttgtttattgtaattttcgtttttagggtttaagtgattttgttgttttagttttttaggtgggattataggtgtttgttattacgtttggttaatttttttgtttttttagtaaagatgaggttttattatgttgggtaggttggttttaattgttgattttaagtgagttatttcgttttagttttttaaaatgttaggattataggtatgagttatcgtatttagttaagtttgtatatatatttttgattatattttttaattatttttaggataaattattagaagtgaaaatttttgggtgaagagtttgaggtttttatatatatatatatatatatatatatatatatatatatataaaaataggttggatgtagtggtttatatttgtaattttagtagtttgggaggttgaggaaggaggattatttgagtttaggaggttgagaatagtttgaataatatagtaagattttgtttttataaaaaatttaaaaaaaattagttggttatggtagtatgtgtttgtagtattagttattcggaaggttgaggtaggaggatcgtttgagtttaggaggttgattgaagttgtagtgagttgtgattatattattgtattttagtttgggtaatagagttagattttgtttttaaaaaaagtataaaataatatttaaaaagtattaggtatgtttgtatttgagttgtttttgttgatggttataaatgaggatagttttggttgaagggcgtttttatttttatgggttgaaggagggatattttgtaaagtgtgtttttaggaagatatagagttttattttttatatttgtttgatttgtattaatgtttgtttatttatttatttaattttttttttgagatagagttttattttgttatttgggttggagtgtagtggtattattgaggtttattgtagttttagatttttgagtttaaataatttttttgttttagtttttggagtagttaggattataggtatgtgttattatgtttggttaattttttaaatgtatttttttgtagagtcggggtttttttatgttgtttaggttggagtgtagtggtgtgattttagtttattgtagtttggatttcgggtttaagtaatttttatattttagtttgtttagtagtaggggttataggcgcgtattattatgtttagttaattaaaaatatttttttgtagagatagggtttttttatgttgtttaggttggttttaaatttttaggtttaagtaatttttttgttttggttttttaaagtgttggtattataggcgtgagttattgcgtttggttcgtattaatgtttagaatacgaattttaggaggtaggttaagtttatttagtttgtttatatgtttgggttaatttaagaaataagtgggtgataaatggtattttttggatagtggtattgattttgaaagtttgggttaggaagttggggaggaagggtgggtaggttgtgggtagttttgggcggaagattaggtagggttatgtgtttattgagttttcgttttttttttttgaatttttgatagatttttgttttttatttttttttttttgtttttttttgttttggtggtttttttgtggttttttagtggtgtttgtaatttttggtttatttttttttaggttttggttttttttagttatggtttttagagtttttttgttaataggtgtatgggggtggggtgggggattttgggtggggaggagggtaatttttgggtttgttataaatagagggtttagaatatgtaggagttagtttggggagaggtaaaggggatttggggaaggagaaagggtttaagaagaagtagggagaatagttagatttagataggttggttagggaagtttggatgaatgattatatttatggattgtgtaaggttgtttgtcggtttttttgttttatatatgaggagacggaggtttagggaggagaagtgatatggtttagggtgcgtagtaggtgtgagattttttttttgagtgtttttttttggatttttttttattatttttattttgttttcggttttattttttaaggtttcgggtgtaaatgtttgttgaatgattgatgaatgaaaatgatttgagtttgttattttttatgtttatatgttgtggaaaatgaaattttttttaaaagggaaggaaatatttgagagttgtataggaaggaaattatttaattaagaatgtatagaaattttattgttgggtaaattatcgttgtgatattgggggaagaagttatttaggtgtttagaagggaggttggaatttagagtaggattggacgtgttttacgacggtggtttttaggttaggagttagtaaatagtggtttgggggttcgatatggtcgacgatttgtttttgtataatttgttagttagagattgaagatgaatattgataatcgatttgatgatagggagtattatttttaaagaattttatttgttttatttgtaaattcgtattataaataaattgtatttaattattatgtttgaaatttttttaatgataaatttgtggaaaagtattttttgttttgttatataagtatttgtataatatattttattagttttttggtttgtaaaatttaaaatttattatttggttgtttatagaataagtgtgttaattttcgttttaggttaatagagttggatttgggaggtagatatttggatgttgggttagttagggtgatcgaatggatgggaaagggaatggagtaggaagatatgttgttatttttttttttttttttgatatagggtttttttttgttgtttaggttgtagtgtagtggtatgattatggtttattgtagttttgattttttgggtttaagtaatttttttattttagttttttgagtattattatattcggttaattttttattttttgtagagatggggttttattgtgttgtttaggttggttttaaatttttgagtttaggtgatttttttacgttagttttttaaattattgggataataggtttgagttattatatttagttattgtttttttttaaattattattagtttttgttttttttttgtatttaattttgagataggatttttttttgttgtttaggttggagtgtagtggtataattagggtttaagtgatttttttgttttagttttttaaagtgttaggattatagtttttaattggtatgttatttttttttgtttgattttttttttattttttttttagt

SEQ ID NO: 88 - DNA, 6696 bp, Artificial Sequence
  chemically treated genomic DNA (Homo sapiens)
gttaaagggagaatgggggaaggattaagtagaggaaagtagtatgttagttaggggttgtagttttagtattttggagggttgaggtaggaggattatttgagttttgattgtgttattgtattttagtttgagtaatagagagagattttattttaaaattaaatataaaaaaaaaataaaaattaataataatttaaaagaaagtaatggttgggtgtggtggtttaggtttgttattttaataatttaagaggttgacgtgggaggattatttgggtttaggagtttaagattagtttaggtaatatagtgagattttatttttataaaaaataaaaaattagtcgggtgtagtggtatttaggaggttgaggtgggaggattgtttgaatttaggaggttaaggttgtagtgaattatgattatgttattgtattatagtttgggtaatagagaaagattttgtattaaaaaaaaaaaaaaagatagtagtatgtttttttgttttatttttttttttatttattcggttattttaattaatttagtatttagatgtttgttttttaggtttagttttgttagtttggggcggggattagtatatttattttgtaaatagttagatagtaaattttaggttttgtagattaagaggttgatagaatatgttgtataagtatttatataataagatagaaaatatttttttataaatttgttattagggaaattttaaatataatgattgagtataatttgtttgtaatacgggtttataaatgagataaatagaattttttgggggtggtgttttttattattaaatcgattattagtgtttatttttaatttttagttggtaggttgtgtaaaaataggtcgtcggttatatcgggtttttaggttattgtttgttgatttttgatttaagaattatcgtcgtggggtacgtttagttttgttttgaattttagttttttttttgagtatttaaatggtttttttttttagtgttataacgatgatttgtttaatagtgaagtttttatatatttttaattagataattttttttttatgtagtttttaagtattttttttttttttgaggagaattttattttttataatatataagtataaaaggtaataaatttaaattatttttatttattagttatttaataaatatttgtattcgggattttggaaaatagaatcggaggtaaagtggagatggtgagaggggatttaggaggaagtatttaggaaaggggttttatatttgttgcgtattttgggttatgttattttttttttttgggttttcgtttttttatgtgtgaagtaaggggatcggtaagtagttttgtatagtttatgaatgtggttatttatttaggtttttttggttagtttgtttgggtttagttgttttttttgtttttttttgaattttttttttttttttaaattttttttgtttttttttagattgatttttatatattttgggttttttatttatgatagatttaaaagttatttttttttttatttagagttttttattttatttttatgtatttgttaatagaaggattttgagagttatggttggaaggagttagaatttggaaggaggtgaattaggggttgtaggtattattgaggaattataaggaagttattaaagtaaagaagggtagaaaaggagaagtaggaggtagaagtttattagagatttaaaggaagagggcggaggtttagtgagtatatagttttgtttggtttttcgtttaggattgtttatagtttgtttattttttttttttagttttttgatttaaatttttaaagttaatattattatttaaaaggtgttatttgttatttatttgttttttgggttggtttaagtatatgaataagttgaatagatttagtttgttttttggaattcgtgttttaaatattaatacgggttaggcgtagtggtttacgtttgtaatgttagtattttgggaggttaaggtaggaggattgtttgagtttgggagtttgaaattagtttgggtaatatagagagattttgtttttataaaaaaatatttttaattagttgggtatggtggtgcgcgtttgtagtttttgttattggataggttgaggtgtgagaattatttgagttcgaggtttaggttgtagtgagttaggattatattattgtattttagtttgggtaatatagggagatttcgattttataaaaaaatatatttaaaaaattagttaggtatggtggtatatgtttgtagttttagttattttagaggttgaggtaggaggattgtttgagtttaggagtttgagattgtaatgagttttaataatgttattgtattttagtttaggtgatagagtgagattttgttttaaaaaaaaaattaaataaataaataagtaaatattaatatagattaaataagtgtaggaggtaaaattttgtgtttttttgaaaatatattttgtaaaatgttttttttttagtttatggaaatggaagcgttttttagttagagttgtttttatttgtagttattaataaagataatttaagtataggtatatttggtgttttttaaatattattttgtgttttttttagagatagagtttagttttgttgtttaggttggagtgtagtgatgtaattatagtttattgtagttttaattaattttttgggtttaagcgatttttttattttagtttttcgagtagttggtattataggtatatgttgttatggttagttaattttttttaaattttttgtagagataagattttgttatgttgtttaggttatttttaattttttggatttaagtgattttttttttttagttttttaaattgttgagattataggtgtgagttattgtatttagtttatttttgtgtgtgtgtgtgtgtgtgtgtgtgtgtgtgtgtgtgtgtaaaggttttaagttttttatttaagaatttttatttttagtaatttattttaagaatagttaagaagtgtagttaaaaatatatgtataaatttggttgggtgcggtggtttatgtttgtaattttagtattttgggaggttgaggcggggtggtttatttgaggttagtaattgaaattagtttgtttaatatggtgaaattttatttttattaaaaagataaaaaaattagttaggcgtggtggtaggtatttgtaattttatttgggaggttgaggtagtagaattatttgaattttgaaggcggaggttgtagtgagtagagattgtgttattgtattttagtttaggcgatagagtaagatttttatttttaaaaaaaaaaaaaaaaaaaaaaaatatatatatatatatatatatatatatatatatatatttgtaagtttgtttattgtagtattattgttaatatgaaaagttgaaaaaatttgaatattttatagaggaatggtttaatgatattttattcggtgatatatttttatttttttttgtgtttgttatttttaattttgtttttaaaggtataggaaaataggtatttttttatatatatatggaatataaattttatttttatgtgatcgttaatgtgatttttaagttaatgattttttttatttttttttaatatatttttttttttttttttttttttttttgtgaaacggagtttttttttgtcgtttaggttggagtgtagtggcgtgattttagtttattgtaatttttgtttttcgagtttaagtgatttttttgttttagtttttcgagtagttgagaatataggtgtttgttattacgtttggttaattttttgtatttttagtagagatagggttttattatttaatatatttttttttgtttttagttttattttttcgataattagatggaaaaaaatgtttgttggttgaaaaaaaaaaaagtaattaaaattatgtatatttggttaaaaattatttgtttataatttttatatatagttaggtgtggtgatttttgtttgtaattttagtatattgggaggttaaggtagagggattatttgagtttaggaatttaagattagtttgggtaatatagtaagattttgattttataaaaaaatgtttaaaaattagttgggtatagtgatgtatatttgtggttttagttatttaataggttgaggtgggaggatcgtttgagttaaggaggttgaggttgtagtgagatatgattgtattattgtattttagtttggaaaatagagttagattttgtttttaaaatatatataggtagggtatgtaatatatataggtacgtttgtaattttagtatttcgggaggttgaggtgggaggattatttgagattaggagtttaagattagtttggttaatatggtgaaattttatttttattaaaaatataataattagttaggcgtggtggtaggtatttgtaattttagttatttgggaggttgaggtaggagaattatttgaatttgggaggtggaggttgtagtgagttgagattgtattattgtattttagtttgggtaatagagtttgatttagttttaaaaaataaaaaattaaaattaaataaataagtatatatatataaaaataaattatatatatatatatatatgtaggaaaattaaatgttaatagtcgttatttttaagataggaggattataggtatgttttagtatttattgttgtagagcgagttattttaaaattttatagttaaaaatagtagtatattataatttttcgcgtatttgtgaattttttggttttagtagtttttagcggggttttttatatgattgtagtcggattataattagggttagagtaatttaaagtttagttgggttgggtttttaaaatgggttatttttatagttggtagttggtcgtgggttaggagtttagttggggttgttatttgggtatttttacgtgttttttttatgtggtttgggtttttcgtagtatggtggttggattttaagagtaagtgttttaatagataggaagtagaaatttttaggttattaaggttttgatttggaaattggcgttaagttatttgtattatattttattgattaggtagttatagagtttatttatatttaagtaaaggggatatagattttattttttaatgggaggaatttgtggttgtatttaatttgttataagatgattttaatatttttttttatattatttgtatttaaaatatttatataggttgggtgtagtggtttatgtttgtgattttaatgttgtgggaggttaaggtaagaggattatttgagtttaggagtttgaggttatagtgagttatgattttaatattgtattttagtttgggtaatagagtaagattatgttttaaagagaaaaaaaaaaaaagatttttatataaaaaaaagatttataattataaaaaatattaatagataatttaaaataataggttatttgtatttgttagtaggtaaagaagttgaggaaaggacgaacgaagttatgagtttaagatgagaagatattaattagggtgttcggggaggagtttagtagattagttgggtttgttttgggaaaagtttttatattttggttattatgggggttgttcgaatttagacgtggaggtttttttttgttttgaatagtggttaagggtttattttttgtaaaaatataggtaagattttagattggttgtttaatttgtagaggtttttttaatgagttattattaagtgtgtatttgatttggtgatcgtgggtggggatatatttataagttgttggttgtttttttttatttgttttttatttttatttttgataaaattttagtttgattttttttataagtggattttgagataaggttttaagtgtaagtaatttatttggaaggtgatttcggaaatattggtgggaaagtgaggaaaagaaggagttaatgttaggtataatggtttattgtttgtaatattagtattttgggagtttagagtgggaggatcgtttgagtttaggagtttaagattaatttgggtaatataggaagattttgttttttaaaaaaaatttttttttaattatttagtgtggtggtatgtatatgtagttttagttatttaggaagttgaggtaggaggattatttgtatttaaggggtcgaggttgtagtgagttatgattatgttattatatattgtattttagtttgggtaatataataagatttcgttttttaaatttttttaattaaataaataattaattaattaaatattaatatgtattaaataggtgtgggaaattaaattatttttttgaaaacgtatttcgtaaaatgttttttggatattttgagtttaagtgttggaggttgtagtgagttatgattatattattgtattttagtttgggtaatagagtgagattttgttttaaaaaaaaaaagaaggaagaaagaaagagtttataaaagatatgtaattaaataaattattggtcgggtatgatggtttacgtttgtaattttagtattttgggaggttgatgtgggtggattatttgagattagg

SEQ ID NO: 89 - DNA, 16724 bp, Artificial Sequence
  chemically treated genomic DNA (Homo sapiens)
ggttggttttagttttttgggtttaggtgatttttttattttagttttgtaaaatagtggggatatgttagttattattaagttcgtggataatggaattaatttttaaggtttgtaagttttgaggatataaagataataaggtgtagtttttaagagaagttttttttggagataggttgacgtttaatataagtaatgaaagaagaataggaaatagttattttaaggatattgtgtatgtttgtatataatagaaggatggaggtttgtggaaaatggttataggtagaattaatgttgtttaggaagatggagttttttgagtaaagatagtattttggagaaaagttaagttatttaatatggttaaagtttttttgtgaggtgggaagtgttaagaaatgagagttgagagtatgataatgtataagattattttgaggagaattgtagtgatttaagaatagagatttagggaattttagtattgaaggggtagtttaggaaatatggtttagaaaggtaataagtttattgtttgttttttttttttttttatttatttaaagagtagaagtgttggttagaattttttttgatatagattagataggaaagggtagtattgggagtggaagtggttatgggggtgaagagagaataagttagtttttttaataaatagttaagagaggagtgataggagtgagttagataagtaaatagtaataaaaattttagggtagggtttagtgggttaaagtttttagagaaattgagagtagaagaagtagatttttgaagtttttatgggttattaattgaattttttttgaggttttttgagagagataaaatttgaaattttttttaaattatggattaagtttttttgtttgtagagatagagttgcgtgaagttttggtttgattatggttattgaaggatttgttggatagatattaggggaattaagagagtgaaataatagttataaaaatttacggtaggagaattgtttgaatttaggacgcggaggttgtagtgagttgatatggcgttattgtattttagtttggtgatagagtgatattttgttttaaaaaaaaaaatttattattgttattatgttaaattattagttttaaaagtattaatggtaataagaattgtttaattttaagagatagatatagtattattttttttttttttttatagataagaaaattgaggtatagattggttggattgatttttttagggttatataattagtagttggtaaagttaggaatggaatttaggtgttttattttatagaaattattggaattaagatttttattaaagtatagggtagtagaggataaaatttaaagtataaattttttttattatttaatattttattttttaagaaaaggattatatttaatgaatatttaatgtatatatagaagttttttttttaagttggaaaattgttataatgtagtttaaagagtagtgttatgggggtaggggaggggtattattattttttcgtagattaaaatatttttttttttgttttatgtatatagtattaggtgtaatgtggattttgaattagtattagttgaattgatatgttttataatataatttgtaaggtattgtgtgagtggttgttcgagtatggttatataaagagatgtttgtatttataattttaagtttttaaagttattgggttagtttgttttatagttttttaattgaaatgtatgtttgtttttttttgttgttagatagtttcgttttgttatttaggttggagtatagtggtttataatattataatatttcggtttattgtagtttttgtttttcgggtttaagtaatttttttgttttagttttttgagtagttgagattataggtatatattattatgtttggttattgtttttttttttttgagatggagttttattttgttatttaggttgaagtgtagtggtacgattttggtttattgaaatttttgttttttaggtttaagtgatttttttgttttagttttttaagtagttgggattataggtgtttgttattgtatttagttaatttttgtatttttagtagagataggtttttattattttggttaggttggttttgaatttttgatatcgtgatttatttattttggatttttaaagtgttgggattataggtgtgagtgagttattgcgttcggttaatttttgtatttttagtagagacggggttttattgtgttggttaggttggttttgaatttttgattttaggtgatttatttatttcggttttttaaaatgttgggattataggtatgagttatagtgtttggattatttgtttttttaaaaaaaataaattttttgatttttaagattgtttatttaaaataaatttataaagaatggtttaatagtaagtgtttttagtaagttgtagttttatttgggggtgtgttgtttatttaagttttggtgggtgtatatgtgttgttatttcgtgggtttttttttttttttggtttttttatatttttttattttattttggtttgtcggatttttgttttgcgattagaagttgaggagtgggagatttattggatttagttagagtttaaatttttttgttttttttatttggatggatttttaggtagattggttgttatgtttttaagatataaaagattttttgggtttatgtatatatattaatagtttttttggtgtattaggaaagaaggtgagaaataagttgtatttgtatttatgtgtaaggatttgtgtaggatttttttttttaattagtaattttttttaggtagatgttagattatgttttgtaaaatatgttaaaggttttgttgtatattttttagttaaatttaaaaatggaaatatttaatgtattttttttttgagatggagttttattttgtggtttaggttggagtgtagtggtattattttagtttattgtagttttcgtttttcgggtttaagtaatttttttgttttagttttttgagtagttgggattgtaggcgtatgtcgttacgttcggttaattttttgtattttagtagagacgggattttattgtgttgtttaggttggtttcgaattttcgagtttaggtaatttgtcggttttagttttttaaagtgttaggattataggtatgagttatttcgttcggttttttttttttttaaatatagggttttgttttgttatttaggttggagtgtagtggtaggtttatgatttattataatttggaatttttgagtttaagcgatttatttatttgttttagttttcggtatagttgggattataggtatgtattatatttttagttaatttttaaatttttgtagagatgaggtttttttatgtttttttggaattttcggttttaagtaatttttttgttttagttttttaaagtgttgagattgttagtatgagtatttggatttggtttaataaatattataaattcgaattaggtattttatttttatttatatatatatttttttataggattatttgatagttattaatgtatattatgattgagttttaatagttattttgggaaaatagaaattattgttttagtatttatttgtaagttgtaagtttatataatgtatttaaattttattttgtttaatagattttgtagtatatgaaatatttgaaatatggaagagttatttttttgggtattttgtttatttcgtttgttatttatttattgattggatattttattgatcgattattatttgtttggtaaggtgttagaaataagaatattaagaaaaaggttaaggtttttgtttttaaggtttttttttttagtttagtgttgttaaggtttgatgaaatatattagtggtaaataagtacgcggggttttattttatcggtgtgcggttttttttttagttttgaaattatgtttatttaaatattttaaattaataaattagtgtttttaaattatataatcgtagttaataaattgggaataaggtttcgattattttgatttgatttaaaacgattattgttaattttttgttttgcgaattttttttttgattattaagttaagttttatatattttatttgtaagaggttatgttggttttttggaaattcgtaattaagtttagtgtttgtggaatggagtgtaattaacgattattaattaatagggtttcgttcgtgagagtttgttaggttaagtagtagaaatacgagaaattgataaaaagttttttttatttttaaataatagtcgtacggaagttttcggcgggataagggaacgtgggtgtttttgttattttcgtggacgcgggtagattgggacgttggatcgtattttttcgttttcgtttttacgtttttttaggtgtttagtttgaggttttcgtttaggagcgttgtcgttgatttaggtttaggagttgggggtttttgtatagacgtttaggtttcgggataggcggcgattgtatttacggaagtacgttgagtttttttttgtagaagggcgtttttttttttttatttttttttttagttttatagtagtttttcgggtcggttttttttttttttaggtttttttttagtgtcgtcgcggtttttaggtttgaggtgcggcgtttatttcggtagtttttagttttagacgttgcgtggagcggcggagtcggagggaagtaaaggatcgtttgcgttgttgttttcgtttcgcgcgttttgcgtttttcgtttttggcggtcgtttcgaagtttagtttttttgtttgtttcggagttgtttcgggttagtcgagaagagagcggtcggtaagtttgggcgcgcgtaggcggcgggtcgcgggtattgggcgtttcgttggggcggggggaggtggttatcgttttcggtttggcgtttcgcgcgtatttcggcgatggttttttcgtcgcggcgacggttgcgtttcggttttcgcggtttttcgttttttttttcgggatttttgttatttttgtgtcgcgtttttaatttagacgtggatagttttgtcgagtattttggtttcgagggaagttatttcggtttcgtcgtggattttttcgtgtttagcgcgttttcgtaagtggtcgtatttggaattggagtcggtttttttttttatcgcgcgtatttatttagcgtttttttattgggattgattttcgagagatttcggcgtttgtttgttttatttattttattttttagagtggtttatattttgggtggaggaaatatttggggaaatgaattttttttggtatttattatttagttatatttcgttttttattttttaaaattggttaggggtagcgggagagttttgaagtagatttgtgtttaaaaatcggggaaagtgggaaattaataaaggttggttttgtcggatttttcgttttttgtgttagtgtcgaggatttggttaatattattttcgaattttttttttttttttattagttaggttttttggtagtttttttttgttttataggtttaacgttcgttttttttagtttttttaaataagtttttttttatttttttcgtttttgtttgattttgtttttttttattttttttgtagatattttgatgatttaaaatgattatattgttttattgaatttattgtgttttatttttgggattgttagatatttgtatatttgaggttgaatagatgaattgaatgtgttatttgttttttttatagtgatttattatttaggttattgtttagaaggaataagggtgtttgttgagtttttattcgttgtaggttatttgaatattgtagtatttaataatttagttatgtttttaagttgttaacgtttcgcgttgtaagggtcgttaggatttataatagttattgttattattgtgttagaaattgttttcgattttattgaatgttgatattatttttattattttatttttatgttagcgttaggagtattgttttaatgaatgttgattgtttttttaatgatgtttaaattttgtttttaagagagaaattgtttttagggtgttttttaaacgtttagattttgtaataatatatttttgtttttatattttttgtataagatattttttcggggtgaagtggaggaaaattttgacggttagtacgtggataggattattttttattatatatatgtttaatttgagggtggttttaatggttttttatgattgttaggatatttagtagaatttagttttagtgtttttttgaatgttattgagtattatttattttggtaataatttttgtagtaatatatagattagatgtagttaatggaaattttgttagtggagatattattttatgtagtaagtttagttttatttgttgttagtagttatagtgttttttgtgagatttggagtatagattttttaatatgataaaaataattattatttaggtaatatttattaattttatattttatttagttattttagttagtattatttttttatttattgtttttaattataggggtgaatattaaacgttatttttaaatatttttgtttttagatatttttaagtgtatatttttatgagatagaatattttagttgtttttaagggtttaatgtgagatataatttgtagagaaattttaatgattttgaaaatatatgtttttagttaaaaattagtatttaaatattttaggttaggtatagtggtttatatttgtaattttagtattttgggaggttaagatgggtagattgtttgagtttaggaatttgagattaatttgggtaatatggtgaaattttgttattataaaaaaatataaaaattaatcgggtatggtggtgtatatttgtaattttcgttttgcgggaggttgagatgagaggattgtttggaaagttgaggttgtagtgaatggagattgtgttattatattgtggtttgggcgatagagagagattgttttagaaataaaaataaaattaaaaataataaataataataataataaaataaagttgatggtagtgttttataatgttattgttaattttttagtagtgttttgagtttagtgtaagataaatgagaggttgataaattttaagtgttttttttttttttatgaaaaatgtagtgatgttgaattttttatgatatttgttattgttgattataaattagggtgattaatttttggttagttattataattaatgaatgtgttatgattttataggtttatatgattttatttatagatttttaatgataaagtaaaattgaatttgggtttggttgtatataatattttgaaatatttattagtaattttgttatcgatagattatagagttttaggtataggtaatttaaaaaatggaaattaattttgaattttttttttttttttttttaaataaaacgtatataaatataggtttttatttattgagttttttagatttaataaaaatttatgtaaaattttgttgaattttttagaagggtattttaaatttaataagtattggaatttaaggtatttgggatgttatttttaatattattagttggatttattgttatttggtattattataaatttttaaaagaaaaaaagttatataatgaaaaagtatttgttaatttaagagcgttttttttttgaggggagaaggatttgtgaggagtagtggttgtgacgtttatttttgttgttttttttagttttggtgtttatatattttggggaagttgtagaattattttatgtttaatttttttttttatagaaaattattattgaattatttgtatagtttatagttttgttgtgaaaattaatgaattaatatttattaaagggaaggataaagtattaagtaaaatgttaaggcggttttttaaaaaattattttagaaatgagttaggttcgaagtaaaaatttataaatatagtgatttttaaaattatgaaaaaatattcgtattttgtttttttttttataagtatttatttatgttatgttgtaaaatttatataaaatttaaagattgtatgtaggttaataattagagttatattttttttgtggagattaattggaaaaattaaaaattatattttaggtttaattataatgatgatattttattttggtaaatatattttataatttgttaagtatttatattttattttattttatagtttatattatcggggggaagtaaggggaagtagatatatttatttttatagatgaggaggaaatggaggtagaatcgtttgtagtttagttatttgagtaggttggtgtgagtagagggtaaggaagggaaggattcgaagatagggtgtaaaatttaaattttatttttattaatttaaatattgaatttttaaagaaaataattgaataattttaaaatttattttttaaatatatgttatatagtttttattttatgtatttttttattttaaaataatgttataatgaatgatattggatttttgtttttttttttattaaacgttaatggagttttattttatagttggtaatgtgtagatgtgtatgttttagaagtagaaggttttttaatggtttttagttttaattttatgtttgtaatatttggaaagttttttaaataaaatttttgttttggttgtattttaaatttaaaagtagatttttgatttgatattttagtggtttggtttgtgaattatttttcgttgattagtttgttttaatttaatttgattaaaaagtttttattaagagatgttagttgtatttttgtttttattaatgttggtattattttttttgttattttggaaatatttttatattttttttttttatgttttatttttttgtgttttttttattttattattttaatattagttagtgattagttaataggtagaagtttttagaaattttttttttttaaggtttttttgattttatttttgttttttattttttattttagtgtagttatgataagtatagttagtggtatttaggtttttttttatttttttgtttattatttggtttttaaacgtgtagaatattttgtttgtttttatttattttatttttttgtaatatttttttttattttggtattttgttgtaaaaatttttataataaagtttttattgttagtaagaaagtttaaatcgtttaatatggattaaggttatttgtaatttgttttaatttgtgtgtatttttaaaattttatgtattatttttatttttattattttaattttttttataatattttataaaatgatgttagtttattttttataaattttagagtagttttgattatattggttgattttttttattataaataatatatatgtatattaggggatataaaattaggttataattttgttatttagaaagtaaattttatattatttttgattaaggatatatgatgttttatagagtattatgaaagataagggaaaatatgtggaaattgtagttattgtttttgttttatagtagttgttgattggtatttttgttttttttttgatttaaaaaagtattttttaaaaaatgaaaagtaaatttgaaattggaattgtagttttgaaataatatttagtattattttatatatatttatttttatatatatgtatgatagttttttagaagttttttttggtgaaggtttattggttaatttagagttagttaaatatattaaatatgttttattttagaaaggttagtgttgaaagtagataaataagttagtttatttggagggtttgaaaaatggatttgttattgtttggtaggttgtttttttttggttgttaaggttatatttcgtgaattaattgttttttaagtatagtttggatagggagtgtatttaaaggttatttttttgattggtttttttgagttttttgtttgttttttttttattgttttttttgatatttttttttttgtatcgtttttttttttttttttttttgttttttgttttttttttttttttttttttttttattttttttttttttttttatttatttttttgtttttttttttaaatttaattttttatattttagtattttttggtatggatgtaaattttaattttgaagttttagagagttatttaatggtagtgtttttagttattaaaaaaaaaaatgttgaggatggggattttgatgatgtttttggatatattttttggagggaaatggagtttattaggagagagttgcgggtataggaaattaagttatttagttttagatttatattgttaattagtgaaaatttttgttaattttattttattttgtgtattttttttatttcgttattattgataagaaatgtttaagttggtttttttattttttttttttttttttttttttatttgagttaattatttgattattaatggttttttgaaaatattgaggaaagaaaagtttttttaaagatagaatttaagttttatattttttatttttttagggaataatttattaatggtattaattgtttttaggacgaagatgataattaaattttattattttgtattttcgtggtgttttagattttttaagtttgtatttatttattattatttttagaaagtttttttttaaagtaattatagtgggtattgttattgttattcgatagaagggaatagagatttaaagttattgttttaattgatttgtagtgtttgtaaattttaattttaaattgtttttattagatagtgttgtttagattataaatattttttttttggtttgttagtttttttattttaattaagttgttgtatatttttattagttatttttagatgaaatttaagtaataattatttttatggagtgttttattaattttgttttttgtagtatgtgttgttttttttttttttttgagatggagttttgttttgttgtttaggttagagtgtagtggtataattttggtttgttgtaattttcgttttttggatttaagtaatttttggttaatttttgtatttttagtagagatggggttttattatgttggttaggttggttttgaatttttgattttaagtgatttttttgttttggttttttaaagtgttaggattataggtatgagttatcgtgtttggtttgtgttgttttttattttttaatttttttatatagtattttttattattttgtatttagttttttatgtaagtattttttttttattatatagttttttcgtaagattttaatatatgtttaaggttattttattttttttatttttttattgttttttttaaaaaatttaaatattttaatgataattttaatatcgagatggtattttggatgaaaaattttattagttttttttttttataaatttagtatgtagatattgatatattttttttatattattttgttatttttgtagtattttattagtatgtaagtttgtatatgaaggtatgtttaggaaaatttaatgaatatttatttgtatatttgattattattattttatgtttataatgtgtagatagtttgatgaaaagtaataggtttgtttttggtattatttaaggaatttatgttatgtgttgttaatagagtggtgtttttatttagagaatgtttttattgggttttttttttttgtttttgttgaaggtttttttttaataattttcgagttttttttgttttatagtgttaagtaaagaaagtatttgaaatttaaaattaagtagagatgttatataaggaaattgttttaagggtaatttaaataattggatgtttaatagaggatgttttttgtatttttgaggggtttagacgtagtggaaatgatttatttatatatggttattttaagattgagatatagttattgaatttattttgttattttattgtttatttaaattttttttgagtttttataatgtggtaggtgtaaaagatgaattagagtattttatatttaaagaagtaatttattataaggtaggtagaatagttttgattaaaaagttataaaatatattgtaagataggggtttttaattttcgggttatggattagtattagtttatagtttgttagggattatgttgtatattaggaagtgagtagtaggagagtgagtattattatttgagttttgttttttgttagattagtggtggtattagatttttataggagtaaattttattgtgtgaattttgttgtgaagtgtgtatgtaagggatttaggttatatgttttttatgagaatttaatatttggtgattcgagttggatagttttatttcgaaagtatttttttttatgtttagggaaggaaaggttggggattattgttgtgagttattatttgaagataatttagaagtgatttttgtttgtaggtttttaggtaaagtttgagaattagtttttttattttgatgtagaatttggtatgatttataatattaagaacgtgtatatatttgtgtttgtattatttttattaggattattgtggtaatgttttaagtaagtattatttaagatattgatttttaaaagtaaatttatttgaattgtttttttgttttagtatgtatttaaaaattatttaattttgatgaaaaggggtagttgtgtgattttggggttaaattttagattcgtagaaaaaaaattgtatatgtaataaatttatatattataatttatatatatatatatatatatatatatatatatatatagagttttattgtgttaattaattttgttttagaaaaagaatcgatggggttttgatgacgagttgtttttttagttatgggaggtggggatttttttatttatagtatttttttttttttttttttgagatagagtttttttttgttgtttaggttggattgtagtggcgtaattttggtttattgtaatttttattttttaggtttaagtgatttttttgttttagtttttcgagtagttgggattataggtttatgttattacgtttggttaatttttatatttttagtagagatggggttttgttatgttggttttaaatttttgattttaagtgatttgtttgttttagtcgtttaaagtgttgggattgtaggtatgagttattgtgtttaattttttttttttttatgaaagatttttgttgaatgaaaattaagtttattttttatttagaattattttgtcgtgatgggagagagttaatattggtgttttattgatgttagatatgattgtatggagttttattaaatagggcgtggtttggttgggagttacgtttttattttgaatttgtggatttttaagataagtgttagaaagtaggattttttgtaattttgtaattcgtatagttagtttttgtttattgtagatgagatttggtagttattatttagaataagaaattgattttaaaagtttaagtgaatgtattttatatttaagatgtatattcgttttaattttataaaaaggtgaaaagtaattgtaaatgttttttttgttagaataatttaagtgatttagtatttaatgaaataaaatgattatggtgatagtattttaggattgtttttgtttgtttgtattttgttttatttttttttatattttaattagttttttgagattaaagataaaaattttttttattttattttttttttttttttgatttttaaatgttgttgtttttgagaatttatttattgttttttttttttcgacgttttttttggttgaataattttaattgtgttttgatatagtatattgttttaggtagggttttagattataattggatgatttatagatattttaaataaatatattaataattgaatttatggtttttttgtaaatattaattttattttattttttgagatagggatttattgttttatttaggttgtttgtttattttgtagtatttgtaattatagtttattgtagttttaattttttgggtttaagttatttttttgttttaggattttagttttatttttaaagttgggattataggcgtatgttattatatttagtgaattgttttattttttgtagagatgggggttttattatgttgtttaggttagttttgaatttttgtaagtatttaatttgttttttgtttttttgttttttaggttttttttttattaatgtatttaagaaggaaatttaggtggtatttttgaatgtttttttttttatatttaggtttttagcgattgttgttgtattttagatgtttttttttatttgttatttatttttttatttatttttttattgtagattatatttatttgttttttgagttgcggttagttttttgttttttttgttttattttttttttttttttttttaatgttttttttatagggtataatatttagttttttttagtagatgattttattttttttaaaaaatttagtggttttaaatgaattttgggataaaatataaagtttaattatggttaaaaggttttatttgatttagttattgttaggttttttgattttattttgtgttattttcggtttgtttttttttttagttatatttttttttgtagtttttggagatttaatttttttttgttagggtttttttatttttgttttatatattttttttatttttttattttattttttttatttttattttttatttttttttatttttaatatataaatgtttttaggtattttttttttgattttgtatattttaatgttgtggtgagttttttagaaataatttttttgtttattttatttaaaagagaatttttttttttattttttaaagatgatttttttagagagatttttttttatttagaggaaatttttttttttttatttttagagataattgttttgtttaaagaaggttttttttttttatttttaaaaattttttttagttaattgtttgtttatttggtaggatttgtaatagtaatttatttattggttagttttttgtttttaagggaatgtaagttaaatttttttattaagagtaggaattagttaagtatagtggtttacgtttgtaattttagtattttgggaggttaaggtaggtagattatttgaggttaggagttagagattagtttgattaatatggtgaaattttgtttttattaaaaatataaaaattagttaggcgtggtggtgggcggttgtaattatagttatttaggagattgaggtaggagaatcgtttgaattggggaggtggaggatatagtgagttaagattatgttattgtattttagtttgggtggtaagagtaagattttgttttaaaaaaaaaaaaaaaggtagaaattaaggttgttttagttatttggtatttttagtatttaggattttgttttatgtagaggaagtatttattttatattttttatgaatgaatagaaaataataaaagaaaatatttttttaaaattaaaaattttatttttgattattgtgtttttggtttattttattttaatgataaagaaattgaatagtggttttaatttttgattaagaattgattagattaattttgtgataagaaattttttattaaatagttaattattaaaaaaaattaagtttaggtaatgtggcgagattttatttttatagaaaatttaaaaaaaaaattagtttagtatggtggtatatgtttgtagttttatttgtttaggaggttgaggtaggaggatcgtttgagttaggagttggaggttgtagtgagttatgattgtattattgtattttagtttgggtgataaagtaaaattgtgttttttaaaaaaaaaaaatagaataaaataaaaattatagtaatatttttaatgtaagataatttttttaaatgggaaaattatatttataattatattttggaataatttatttagaatatttttttttttgtttaatatttagaatatagaaaatgtatagtaatttttttatatacgtatatgtatatatatatatattagaatattaaaataaaatttttttgtttttaggtagtatatatttttaagagttttattgagatatgtgatatataataaattgtatatatttaaagtgtatgattgatttgtataaatttttaaatgaatgtaattttgaatttgttttataaagttattaggaaaaataaattatattaaataatgtatgtatgtaagagattattaaatgaataatgaagattatgtttttagtgaatagtaaatggttttaaaaaatatttatagataatattaagagaatgattgttttttataaattagaagatattgtttatattttgttttatttaaattttggtttgtcgtttttgtattttagt

SEQ ID NO: 90 - DNA, 16724 bp, Artificial Sequence
  chemically treated genomic DNA (Homo sapiens)
gttaaaatataaaagcggtagattaaagtttaaatgaaataaagtgtaagtaatattttttgatttatgaggagtaattatttttttgatattatttataaatattttttaaaattatttgttatttattgagggtataatttttattatttatttggtagttttttgtatgtatatattatttgatatagtttattttttttgataattttataaggtaagtttagggttatatttatttaggaatttatgtaggttaattatatattttaaatatgtatagtttattgtatgttatatattttagtaaagtttttaaaaatgtatgttgtttagaggtaggaaagttttgttttggtgttttggtgtgtgtgtgtgtgtatgtgcgtgtgtgagagaattattatgtattttttatattttgaatgttgagtaaaaaaaaaaatattttaagtaaattattttaaagtataattataaatatgatttttttatttagaaaaattattttgtattagaaatattgttgtaatttttattttattttattttttttttttaagagatatagttttgttttgttatttaggttggagtgtagtggtataattataatttattgtaatttttaatttttggtttaagcgatttttttattttagttttttgagtaggtagaattataggtatatgttattatgttaagttaattttttttttaaattttttgtaggggtggggtttcgttatattgtttaggtttaattttttttaatagttgattatttaataaaaaattttttattataagattaatttaattaatttttggttaaagattaggattattatttaatttttttgttattaaggtaaaataaattaaagatataataattaggagtaaaatttttaattttaaagagatgtttttttttgttgttttttatttatttataaaagatatgaagtgagtgttttttttatataaagtaaggttttaagtgttagagatattagatgattaaaataattttggtttttgtttttttttttttttttgagatagagttttgtttttgttatttaggttagaatgtaatggtatgattttggtttattgtattttttatttttttagtttaagcgatttttttgttttagttttttgagtaattgtgattatagtcgtttattattacgtttggttaatttttatatttttagtagagatagggttttattatattggttaggttggtttttaatttttgattttaggtgatttgtttgttttggttttttaaagtgttgggattataggcgtgagttattgtgtttggttgatttttgtttttaatggaggaatttagtttatatttttttagaggtaagaaattagttaataaataaattattattataagttttattaagtaagtaaataattagttgagagagatttttgggaatagggagaggagattttttttagatagagtagttatttttaaggatgagaggggaaagattttttttaggtaaaggaaagtttttttaaggaaattatttttaaagaatggggaagaaagtttttttttagataaagtagatagagaagttatttttaaggaatttattataatattaagatgtataggattagaaggagggtgtttaggagtatttgtgtattgaggatggaggggagtggggggtggggatgagggaagtggaatgaagagatggagggaatatgtgaggtagaggtagaaagattttggtaagaaagaattgaatttttaggagttataaagaaaggtatggttgaaggaggggataagtcgggagtggtataagataaggttaaggagtttggtaataattaagttaaatagggttttttggttatggttaaattttgtattttattttaaggtttatttgaagttattgagttttttaagaagaatgaaattatttattaaagaaaattaaatgttatgttttatggggaaagtattaagggagagggagaaaaaaatggaataaggaaagtaaaggattggtcgtagtttagggagtaggtgagtgtgatttgtagtaagagggtgggtggaaagataggtgatagatggaaaaaaatatttggagtataatagtaatcgttggaggtttgaatatgagagaaaagatatttaagaatgttatttagattttttttttgagtgtattgatgggagaaaagtttagagagtagagaagtagaaggtagattaagtatttataggagtttaagattagtttaggtaatatagtaagatttttatttttataaagaataaaataatttattgggtgtggtggtatgcgtttgtggttttaattttgggggtggagttggggttttgagataggaggatggtttgagtttaggaggttgaggttgtagtgagttgtgattataagtgttataaagtaagtaaatagtttgggtgaaataatgagtttttgttttaagaaataaaataaaattagtatttatagaaaaattatgaatttaattattaatatgtttgtttgagatatttgtgagttatttagttgtagtttgaagttttgtttgagatagtatgttgtattagaatatagttggggttatttagttaggggaagcgtcgaaagaggaggggtaatgagtgagtttttagggataataatatttaggagttaagaagagaaagaagataaagtaaaaaagatttttgtttttaattttaagaaattgattgaaatataggaggaaataaagtaggatataggtagataaaaatagttttaaaatgttattattataattattttgttttattaaatattaagttatttaaattattttggtaaaggaaatatttataattgttttttatttttttgtgaaattagaacgaatgtatattttaaatatggaatgtatttatttgaatttttaaaattaattttttattttgggtagtagttgttaaattttatttatagtagataaaagttggttgtacgaattgtagggttataaagaattttgttttttgatatttattttaaaaatttataaatttaaaataaagacgtaatttttaattaaattacgttttatttaatagagttttatgtagttatatttggtattagtaaaatattaatgttggtttttttttattacggtaaaatgattttgggtagaaaatgaatttagtttttatttagtaaaagttttttataagaaaaaaagaggttgggtatagtggtttatgtttgtaattttaatattttgggcggttgaggtagatagattatttgaggttaggagtttgagattaatatggtaaaattttatttttattaaaaatataaaaattagttaggcgtggtggtatgagtttgtaattttagttattcgggaggttgaggtaggagaattatttgaatttgggaggtggagattgtagtgagttaagattgcgttattgtagtttagtttgggtaatagaggaaaattttgttttaaaaaaaaaaaaaaaaaaatgttatgagtaagagagtttttattttttataattaagagagtagttcgttattaaaattttatcggttttttttttagagtagagttggttaatatagtgaaattttgtgtgtgtgtgtgtgtgtgtgtgtgtgtgtgtgtataaattataatatgtaaatttattatatatataattttttttttacgggtttaaaatttgattttaaaattatataattatttttttttattagaattaaatgatttttgagtgtatattagaataaaagaatagtttaggtaagtttgtttttgagggttaatattttgaatagtgtttgtttgggatattgttatagtagttttaatgagagtaatataagtataggtatgtatacgtttttagtgttgtagattatattaggttttatattaggataggagaattggtttttaagttttgtttggaaatttataagtaaaaattatttttgggttgtttttaaatagtagtttatagtagtggtttttaatttttttttttttggatatagagggggatgttttcgggatgaaattgtttaattcggattattaggtattaggtttttataagaagtatgtaatttagattttttgtatgtatattttatagtagggtttatataatagggtttgtttttatgagaatttaatgttattattgatttgataggaggtagagtttaggtggtaatgtttatttttttgttgtttattttttgatgtgtagtatggtttttaataggttatggattggtattggtttatggttcgagggttggggatttttgttttataatatattttataattttttggttaaaattattttgtttattttatgataaattgtttttttgaatgtagggtattttaatttattttttgtatttgttatattataagaatttaagaaaagtttaaatggatagtggagtaataaagtaaatttaatagttatgttttaattttaaagtagttatatataaataagttatttttattacgtttgaattttttaagaatgtagaaagtattttttattaaatatttaattatttaaattatttttaaaataatttttttgtgtaatatttttatttaattttgggttttagatattttttttatttggtattataagatagagagagttcggaagttattaggagaaggtttttaataaagatagagaaaaagagtttagtaggagtattttttgaatgaaaatattattttattggtagtatatagtatgagttttttgaataatattaggaataagtttgttgttttttattaggttatttgtatattataggtatgaaatgatggtaattaggtgtataaatggatgtttattaagtttttttaagtatatttttatgtgtagatttgtatattggtgaaatgttatagaaatggtagaataatataaaaggaatgtgttaatatttatatgttaaatttgtgagggaaaaaagttgatgaagttttttatttaaaatgttatttcgatattaaagttattattaagatatttaagttttttaaagagaataatgaagagatagagaaagtaaaatgattttagatatatgttaaagttttacgaggaagttgtgtagtgaaaaagaaatatttgtatagaaaattgggtataaggtgataaaagatgttatataaaaaaattaaggaataaaaagtaatataggttaggtacggtggtttatgtttgtaattttagtattttgggaggttaaggtaggaggattatttaaggttaggggtttaaaattagtttggttaatatggtgaaattttatttttattaaaaatataaaagttagttagaaattgtttgaatttaggaggcgaaggttgtagtaagttaagattgtgttattgtattttagtttgggtaatagagtaagattttattttaaaaaaaaaaaaaaagtaatatatattataaaaaataaagttaataaaatattttataaaaataattgttatttgaattttatttaagaatgattaatgaaagtgtataatagtttaattagggtaagagaattgatagattagaaaaaaaatgtttgtgatttaagtagtattatttaatggaaatagtttggaattaaaatttataaatattgtaaattaattgaagtagtaattttgaatttttgtttttttttatcgaatggtaataataatgtttattgtaattattttaaaaagaaattttttgaaggtgataataaataaatgtaaatttagaaaatttgaaatattacgaaaatataagatgatgggatttaattattattttcgttttgaaaataattgatgttattaataagttattttttagaagagtagaaaatgtaaaatttaaattttgtttttaaaagggtttttttttttttagtgtttttaaagggttattaatggttaagtgattaatttaaatgaagaagaaaaagagaaagaagggtagaaaagttagtttaaatattttttattaatggtggcgaggtggggagaatatatagggtgaggtaaggttgataagagtttttattgattagtagtgtaaatttgaagttgagtgatttaattttttatgttcgtaatttttttttgatagattttatttttttttaaaaagtatgtttaagaatattattagaatttttatttttaatatttttttttttaatgattggaaatattgttattaaataattttttgggattttaaaattaaggtttatatttatgttaagaagtgttaaaatataaaggattgagtttgggagagaggatagaaagatggatggaaaggaagaaaagagatagaggaaaggaaaaagagaggaaggataagagatagaaaaagaaaaaagagagagcgatatagagggagaggtattagaggaggtagtgagagggagatagataagaggtttagaggaattaattaggaggatggtttttggatgtattttttatttaaattgtatttgaagggtagttgatttacggaatgtgattttgataattaaggaggggtaatttgttaaataatgataagtttattttttaaattttttaaataaattaatttgtttgtttgtttttagtattgatttttttaagataaagtatgtttaatatatttagttgattttgagttgattaatgagtttttattaaaaggaatttttgaaaaattattatatatgtatatagaaataaatgtgtatgaaatagtattgaatgttattttaaagttataattttagttttagatttattttttattttttaaaaaatgtttttttgaattaaaagaaaaataaaaatgttagttaataattattgtaaaatagaagtagtaattataatttttatatatttttttttgttttttataatgttttatgaaatattatatgtttttaattagaagtaatataggatttgttttttaaataataaaattatagtttagttttatgttttttaatatatatgtatattatttatgatgagaaaaattagttaatataattagagttattttgaagtttataaaaaatgagttggtattattttgtaaagtgttgtgaaaagggttaaaatggtaagagtagaaatggtatatgaagttttaaaaatatatataggttgggatagattgtaagtgattttaatttatgttaagcggtttggatttttttgttggtaatggaagttttattatgaaaatttttgtaatagaatattaggatgaaaaaggatgttatagaaagataaaatgaatagaaatagataagatgttttgtacgtttaagagttaaatgatgggtagagggatgggggaggatttgagtgttattgattatgtttgttataattatattgaaataaggagtagaaagtagagatggaattaagaaaattttaaaaaggaagaatttttaggagtttttgtttgttgattaattattgattgatattaaggtggtgaagtaggagaaatatagaaaaatagaatatgagagggaggaatatgaaagtatttttaaggtgatagagaaaatgatgttagtattaatagaaatagaggtgtaattaatattttttggtgaagattttttagttaaattgagttaagataggttagttaacgagaaatgatttataggttaggttattggaatattaagttagagatttatttttagatttaagatatagttagggtaagagttttatttaaaaggttttttagatattgtaaatatgaagttaggattgagaattattgaaggattttttgtttttaaggtatatatatttatatattgttaattgtaagataaggttttattagcgtttaatggggggaaaggtaagaatttagtgttatttattatagtattattttaaaataaagaaatatataaaatgagaattgtataatatatatttgaagaatgaattttaaaattgtttagttattttttttaaaaatttaatatttgaattaataaaagtgggatttgaattttatattttgttttcggattttttttttttttattttttatttatattaatttatttaaataattagattgtaaacggttttgtttttattttttttttatttgtaagaatgagtatatttgtttttttttattttttttcggtggtgtgggttatagaatgaaatgagatataagtgtttagtaaattataaaatatgtttattaaaataagatgttattattataattaaatttaggatgtaatttttaatttttttaattagtttttataagaaaagtatgattttaattattagtttgtatataatttttaaattttatgtaagttttataatatagtataaataaatgtttatagaaaaaaaaatagaatgcgaatgtttttttataattttgaaaattattatatttgtgaatttttatttcgaatttgatttatttttggagtgattttttgaggggtcgttttaatattttgtttagtattttgtttttttttttaataaatattgatttattaatttttataataaaattatgaattatgtagataatttaataataattttttataaagagaaaaattaggtataaaataattttatagtttttttaaggtatgtggatattaaaattggaaaaagtaataggagtggacgttataattattgttttttataaatttttttttttttagaagaaaggcgtttttgaattgataaatatttttttattatgtggtttttttttttttaaaagtttatggtaatattaaataataataaatttaattggtaatattggaaatggtattttaagtattttggattttaatgtttgttaaatttaaagtgtttttttagaaaatttagtaaaattttatataaatttttgttaaatttgaaaagtttagtaagtaaaaatttgtgtttatatacgttttgtttaaaaagaaaaaagaaaaaaatttaaggttggtttttattttttaagttatttatatttagagttttgtagtttatcggtaataaagttgttgatgaatattttaaaatattatatgtaattaaatttaagtttaattttattttattattaaaggtttatgagtgaagttatgtaaatttgtgaggttataatatatttattgattataatgattggttaaagattagttattttggtttgtaattagtagtagtaaatattatgaagagtttaatattattgtattttttatggaaaaaaaaaaaatatttaaagtttattagttttttatttattttatattaaatttagagtattgttgaagaattaatagtaatattgtaaaatattgttattaattttattttgttgttgttattgtttgttgtttttgattttgtttttgtttttgagatagtttttttttatcgtttaggttatagtgtggtggtataatttttatttattgtaattttaattttttaagtaatttttttattttagtttttcgtagagcgaggattataggtgtgtattattatgttcggttaatttttgtatttttttgtagtgatagggttttattatgttgtttaggttggttttaaatttttgagtttagataatttgtttattttggttttttaaggtgttgggattataggtgtgagttattgtgtttggtttgaagtatttaaatgttaatttttgattgaagatatatatttttaaaattattagaatttttttataaattatattttatattgaatttttgggagtaattaaaatgttttgttttatgaaggtatatatttgaaagtatttggaaataaaaatgtttaaagataacgtttggtatttatttttgtggttaaaaataataaataaaaagataatgttgattaaaatgattaaatggaatgtgaaattggtaaatgttgtttaaataatgattatttttattatgttggaaaatttgtgttttaggttttatagaaagtattgtaattgttaataataaataaaattaagtttgttatataaaataatgtttttattaataaagtttttattaattgtatttaatttatgtattgttgtaaaggttgttattaaaatgaatgatatttagtaatatttagaaaaatattaagattaaattttgttgagtgttttaatagttatagaaaattattgagattatttttaaattaggtatgtgtgtagtagaagatggttttatttacgtattaatcgttaaaatttttttttattttatttcgaagggatattttatatagaaaatatggaaataaaaatatgttgttataaggtttaagcgtttagaaggtattttaagaatagttttttttttgaaaataagatttaaatattattaaaaaaatagttaatatttattaaaatagtatttttaacgttaatatgggggtggggtggtgagaatgatgttagtatttagtaaagtcggagataatttttaatataataatggtaataattgttataaattttgacggtttttgtaacgcggaacgttggtaatttgaaaatataattgaattattaaatattgtagtatttaaatgatttgtagcgagtgaaaatttagtaaatatttttgttttttttgaataatgatttaaatagtgaattattataaaaagaatagatgatatatttaatttatttgtttaattttaaatgtgtaaatgtttgatagttttagagataagatataatgaatttaataggatagtatggttattttaagttattagaatgtttgtaaaaggagtaaggagaaatagaattagatagaggcggaaagagtgggggagggtttgtttagggagattgaaaaggacgggcgttaagtttgtaaagtagaaaaaggttattaagaagtttaattggtagaggagaaaaagaagttcggggatgatattgattaaattttcgatattggtataggaggcggggagttcggtaagattagtttttgttgattttttatttttttcgatttttaagtataggtttgttttaaagttttttcgttgtttttaattaattttaagaggtgagaagcggggtgtaattgggtgatgggtattaaagggagtttatttttttaaatattttttttatttaggatataaattattttgagaggtaggatgggtgagatagatagacgtcgggatttttcggaaattaattttaatggagaaacgttgggtgggtgcgcgcggtgggggagggggtcggttttagttttaagtgcggttatttacgaagacgcgttgggtacgaagaaatttacggcgaagtcgaagtaatttttttcggggttagagtattcggtaggattgtttacgtttaggttgaaggcgcggtatagaggtagtaggagtttcgagagaagaagcgggaggtcgcggggatcgaggcgtagtcgtcgtcgcggcggaaaagttatcgtcgaagtgcgcgcgggacgttaagtcgggagcggtagttattttttttcgttttagcgaggcgtttagtgttcgcggttcgtcgtttgcgcgcgtttaaatttgtcggtcgtttttttttcggttagttcgggatagtttcggggtaggtaagagggttgagtttcggagcgatcgttagggacgaggggcgtagagcgcgcggggcggggatagtagcgtagacggttttttgttttttttcggtttcgtcgttttacgtagcgtttgaggttggggattgtcggggtgagcgtcgtattttaggtttgagagtcgcggcggtattgggaggagatttggaaggaggaggagtcggttcgggaggttgttgtggagttggaggaggaagtgggggaggagaggcgtttttttataggggagagtttagcgtattttcgtgagtgtagtcgtcgtttgtttcgagatttgggcgtttgtgtaggggtttttagtttttgagtttgggttagcggtagcgtttttggacgaaggttttaggttgagtatttgaggaggcgtgggggcgggggcggggagatacggtttagcgttttaatttattcgcgtttacgggagtagtaagggtatttacgtttttttgtttcgtcgggaattttcgtgcgattgttgtttaaaaatgaggaaagttttttattagtttttcgtgtttttgttgtttagtttggtaggtttttacgaacgaaattttgttaattaatggtcgttaattatattttattttataaatattgaatttaattacggatttttagaaagttagtatagttttttgtaagtgaggtatgtaaagtttaatttagtagttaaagaaaggattcgtagggtaaagaattggtagtgatcgttttaaattaagttagaataatcgaagttttatttttagtttgttagttgcggttgtatgatttagaaatattgatttgttgatttaggatgtttggatagatataattttagagttggaagaaggatcgtatatcggtgaaataaggtttcgcgtgtttgtttgttattggtgtgttttattaagttttgataatattggattgagagagagggttttgaggataggaattttgattttttttttagtgtttttatttttagtattttgttaagtagatagtagtcgattaataaaatgtttaattagtgaatgaatagtagacgaaatgagtaaagtgtttagagaagtgatttttttatattttaagtgttttatgtgttatagaatttgttgaataaggtgaagtttaagtgtattgtgtggatttataatttataagtaagtattggaatagtaatttttgtttttttaaagtaattattaaaatttaattataatatatattaataattattaaataattttgtgaaaggatatgtatataaatgaaagtgaaatgtttaattcgaatttgtaatatttattggattaggtttaggtgtttatgttggtaattttagtattttgggagattgaggtaggaggattgtttgagatcgggagttttaggggaatatagggagattttatttttataaaaatttaaaaattagttgggagtgtggtgtatgtttgtagttttagttatgtcggaggttaaggtaggtagatagatcgtttaggtttaggagttttaggttatgataagttatgagtttgttattgtattttagtttgagtgatagaataagattttgtgtttaaaaaaaaaaaaggtcgggcgaggtggtttatgtttgtagttttagtattttgggaggttgaggtcggtaaattgtttgagttcgggagttcgagattagtttgggtaatatagtgaaatttcgtttttattaaaatataaaaaattagtcgggcgtggcggtatgcgtttgtagttttagttatttaggaggttgaggtaggagaattgtttgaattcggaaggcggaggttgtagtaagttgagatggtgttattgtattttagtttgggttatagagtgagattttattttaaaaaaaaaatgtattaaatatttttatttttaaatttgattaaaagatatgtagtaaaatttttggtatgttttataaggtatggtttagtatttgtttgaaagaaattattgattgagagaagaaattttatataaatttttatatataaatgtaaatatagtttattttttatttttttttttaatatattaaagaggttattgatatgtatgtataaatttaaagggttttttatattttaaaaatatgataattagtttatttggaaatttatttaggtaaggaagatagaagagtttaaattttggttagatttagtaagttttttattttttaatttttgatcgtaggataggggttcgatagattaaggtggagtgaagaaatgtgagaggattagggaaaagaagaagtttacgaaatgataatatatgtatatttattaaaatttgggtgaataatatatttttaaatagggttataatttattgaaagtatttattgttgagttattttttatgagtttattttgaatgagtagttttgaaaattaaggaatttgttttttttaaaaaagtaaatagtttaggtattgtggtttatgtttgtaattttagtattttgggaggtcgaggtgggtggattatttgaggttaggagtttaagattagtttggttaatatagtgaaatttcgtttttattaaaaatataaaaattggtcgggcgtagtggtttatttatatttgtaattttagtattttgggagtttaaagtgggtggattacgatgttaggagtttaagattagtttggttaagatggtgaaagtttatttttattaaaaatataaaaattagttgggtgtagtggtaggtatttgtaattttagttatttgggaggttgaggtaggagaattatttgaatttgggaagtagaggttttagtgagttaagatcgtgttattgtattttagtttggatgatagaatgagattttattttaaaaaagaaaaaatagtagttaggtatggtggtgtgtgtttgtaattttagttatttaggagattgaggtaggagaattgtttgaattcggaaggtagaggttatagtgagtcgagatattgtggtattgtgggttattgtgttttagtttgggtgatagagcgagattgtttaataataaaaaaaagtaaatatatattttaattaggaaattatgaagtagattaatttagtggttttagaaatttggggttataaatgtaggtatttttttgtgtgattatgttcgagtagttatttatatagtgttttgtaaattgtattgtagaatatgttaatttagttagtgttgatttaaaatttatattgtatttggtattatgtgtatgggatagagaaaagaatgttttagtttacgaaagaatggtggtgttttttttttatttttatgatattattttttgaattatattataatagttttttaatttaaaaggagaatttttgtgtatatattaagtatttattgaatataattttttttttagaaaataaaatattagatagtaaaaagaatttgtattttgaattttattttttattattttatattttagtaaaaattttgattttagtggtttttgtaaaataaagtatttgggttttatttttggttttgttaattattagttgtatgattttggggaaattaatttaattaatttgtgttttagtttttttatttatgaaagggaaaggggagtaatattatgtttattttttagaattgaatagtttttgttgttattaatatttttaagattaatagtttagtatggtagtaataataaatttttttttttgaaataaagtgttattttgttattaggttggagtgtagtggcgttatgttagtttattgtaattttcgcgttttgggtttaagtaatttttttgtcgtaaatttttatgattattattttatttttttagtttttttagtgtttgtttaataggttttttaataattataattaaattagggttttacgtagttttgtttttgtaaataaaggaatttagtttataatttaagaggaattttaaattttattttttttaaagaattttaaaggagatttagttaataatttatgggaattttagaaatttgttttttttatttttaatttttttggagattttaatttattaaattttgttttggaatttttgttgttgtttgtttgtttaatttatttttgttattttttttttggttgtttattagggagattgatttgttttttttttatttttataattatttttatttttagtgttgtttttttttatttgatttgtattagaaaagattttggttagtatttttgttttttgggtgaatgggaaagaagagaaggtaggtagtaaatttgttatttttttgggttatgttttttaaattatttttttaatgttaggattttttaagtttttgtttttgaattattgtagttttttttagggtgattttatgtattgttatgtttttaatttttattttttaatattttttattttataaaggagttttagttatattaaataatttaatttttttttagagtgttatttttgtttaaagggttttatttttttgggtaatattagttttgtttgtaattattttttataagtttttatttttttgttatatataaatatatataatgtttttaaagtggttgttttttattttttttttattgtttgtattaggcgttagtttgtttttaagaaagattttttttaggaattatattttattgtttttgtatttttagagtttatagattttaggaattaattttattgtttacgaatttaataataattaatatatttttattgttttgtaaggttgaagtgggagaattatttgagtttaggagattgggattagtt

SEQ ID NO: 91 - DNA, 8196 bp, Artificial Sequence
  chemically treated genomic DNA (Homo sapiens)
gtttaggaggtagaggttgtagtgagttaagatttcgttattgcgttttagtttgggtaatagagtgagattggttaaaaaaaaagtgaacgtgggttgggcgcggtggtttatgtttgtaattttagtattttgggaggacgaggtaggcggattacgaggttaggagatcgagattattttggttaatatggtgaaattttatttttattaaaaatataaaaaaaaaaaaaatttgttaggggtggtggcgggtgtttgtagttttagttatttcggaggttgaggtaggagaatggggtgaatttgggaggcggagtttgtagtgagttgagatcgtgttattgtattatagtttgggcgatagagcgagattttgttttaaaaaaaaaaaaaaagtaatgtagggtaggggatgggatggtgagggttttattttagaatgataaagagataaaataattaaatgtaataggtggtatggattggatttaaatttaaaaggaaatttttataatagatattttggagttaattaagaaaatttgaatatggattgaattatatattatttaatggagatattatttttttaggtgtgaaaaggggtcgggtttagtggtttatatttgtaattttagtattttgggaggttaaggcgggtagattatttgaggttaggagtttaagattagtttggttaatacggcgaaatttcgtttttataaaaaatataaaaatttagttgggcgtggtggtatgtatttgtagttttagttattcgggaggttgaggtagaattgtttgaatttagaagatagaggttgtagtgagtcgagattgtattattgtattttagtttgggtaataagagtaaaattttgttttaaaaaaataaaggggggtattgaggttacgtgggggattgtttttgagagatatatgttggagtgtttaggatgaaatggtaggataagtgtaattttaaatttaaaaatatataaatgtttaataaatatataaataaatatagtaaaatattatttttgagtttagttggtaaaaatacgggtgatttttgtatttttttaattttttggggtatggtggtttacgtttgtaatttttgtattttgggaggttgaaacgggaggattgtttgagtttaggagtttaagattaatttgagtaatatggtgaaattttgtttttataaaataaaaattaaaaatttatttaggatttgtggtatatatttgtagttttagttatttaggaagttgaggtgggaggattattggagtttaggaggttgaggttgtagggagtttcgatcgtggtattgttttttagtttaggtagtagagtaagattttgttttaaaaaagagggggtttattgagtaattttttggttttgaggagaaaataaattttaggattttgtatcggagaggtttttgtttttagtttgaatatgtggttgatgcgggttttttagataggttattggattttttttattatatattttttgtttatttattttttaatttgtttttttataaaataggtgttaatttattaataagtaatgtatatttttaagtataagaataggggtttagggttgggcgtaatgatttacgtttgtaattttaatattttgggaggataaggtagacggattatttgaagttaggagtttaagattagtttggttaatatggtgaaattttatgtttattaaaaatataaaaattagttgggtatggtggtgcgtgtttgtaattttagttatttaggaggttgaggtaggagaatcgtttgaatttaggaggtagagttgtagtgagtcgagattgtattattgtattttagtttggacgatagagtgagattttattttaaaagaaaaaaaaaaaaaaagaatagggttttagttagtatttatttcgagaatatttagtttattttggagatttttggtttgaattgggagtgaaggaagtaggtcgtagttttcgtttattttggtatttttagtatttggtataggagtttattaattgtttataaaatgaataaataattgaattaatgaatgaataagtttgatttattggaggttatatgaggagtgtaggggagtggaggagtaataatttaaggtttttgggttcggttttgttttaggggttttattttttttgtagagtttaggaagttttttatgagttaattttattttggttttaaggttgtagagatagtggggtttattttagttttataaaatttatatgtaggttgggagtagtggtttacgtttgtaattttagtattttgggaggttgaggtgggtggattatttgatattaagaatttgaaattagcgtggttaatatggtgaaattttaattttgttaataatataaaattagttaggcgtggtggtgtgtatttgtgattttagttattcgggaggttgaggtaggagaatcgtttgaatttaggaggtaggggttgtagtgagttaggatcgtattattgtattttagtttgggtaatagagtaagattttattttaatgataataataaaaaaaattatatgtaatatttaaatttttggggttagtaatttatttgggaatttagtgtaagttaaggttttttttttagtaaatttatattttgaaattagatattttttaaagtttgtataagatttgagatggtttagggattttttattgttaagtttatatgcgggttttaggtaatgaattttaggatttcgagaagttaaggaagtttatggtttattttatttagtgagatttttttgggttgatatttcgttttttagttgttatagggttttaggttttttagttatttttagaagggtttgtaatgaagagaggaaggggttgttgagtttagtggtttggggtatcgttagttttggatttgggttttttttaggaagaagttttagtttttatttatagtggggtgtatatgattttttagttttttaatgggtgttgttggtagatttaggttttttaggtaagttgtttttggtcgttttttgagtttttgttttatgtttttgttttttggggtggataggtatttgttggagtgatttaggtttatagggtatttgtgttggtttgatatatatagatttgagtgttttaattaaattgggattttttttatattgtttttaaatttaggagtaagtttttttgaatattttttttgtgtagaatagtttttagatgattaggaaaggtggcgatttatatatttgtaattagtatttttgtaattattttgagaggtagtagtggaggaatttgtttatagatgatagtatggaggtttagggaggttgtgtgattattttatttatttaattatttttttattgagtatttgttatgtattaggtatggtgttaggtgttagagagtagttgtttttggagttatagtttaatagtgtggcgagatttttaaatattattttaaattaatgtggtaaatgttatgtaaaagttatggtttaagggttatggggatatataaattaatttggggtgtggagaggttaaggaaggttttttagtacgtggttggtgtaacgtttttaaggataagaaggataaattgggtttaatgttatgggaagggattagtttgttgaaaaagtacggtggtttgaaatcgtatggtttggatagtgttgtgttagtagtttggtgttgtttggtattgttggttagtaagtttagagaaaaatggagttttggttgggtatggtggtttacgtttataattttagtattttggaaggttaagacgggtggattatttgaggttaggagttcgagattagtttggttaatatgatgtattaaaaatataaaaattagtcgggcgtggtggcgggtatttgtaattttagttattcgggaaataggtaggagaagcgtttgaattcgggaggtagaggttgtagtgagttaagattgtattattgtattttagtttcggcgatagagtgagattttatttaaaaaaaaaaagagagagaaaataaaaagaaaaagaaaaatgaagtttttttttgatttgaatattcgtggtaagtagtggtaatggagagattgtttttagaggattgacgggagggaggggttagttttgtaattagtttgttaagaataattgtaataaggtatcgagtgttaatttatgttaggtcggtattgatttttttagggtattattgtttatattgtaaggagatttaagtagtttgttgaagggtgtatcgaggattcgattttttttcggttttttttttggatataacgtgaggttaggggttggaggttgagaggatttcgtgaattgtagagtagagttgggacggggagttaggtttttcgatcgggtcgggggtattttttgggtttatgtttcgcgttggtacggagagcggggaggggggtacgcggttgacgatcgtcggggtagtagtagtagtatagttcggcgttggttagcggtttagagtcggggtagggagggttttcgtgcggacgggggttaagaggtcgtttttagttcggggtagttcgcgtattcgagtttggagttcggagtttggaggggtggggaggtttcgcgtttagggtcggatcggagggagagggagagcggtggtttttttttcggttttcgtcgttagtcgatcggggcgttgggcgggcgcgcgggagtcgtagtttttttcggggggcggattcggtttcggcggcggtatttagtttttgtttcgataggtgcgcgtcgcgaaggaatgtagtcggtttgatttattagcgttttttttttatttgcgcgttcgttttataaagcgttgttcgtttcgtttttatttttttaattttcgcgttcgttttcggatagtttttgttcgttcgcgcgttgtagttttattttttagcggtagtttaggcgcggagggagcgagttcgtttcgaggtaggtttaggacgggcgtatagtagtagtcgaggttggtcgggagagggtgagtgttcgttttagttgggtagtcgcgtaggggagttggtcgggtagggtcggtggtttttgttttttttttttttttttgaaggttgataggtttcggtttttttgtttacgttgcgtaggataggtgtttagttttttcggggtgcgtcgggggtagttggtagttaaggggtagggtagttagagaagggtggtgtttattagatttttaggttagaggagcgttttgggtgcgtttgcgggagaagtgggtagaggttagtggttggtagtttttttggttgggtttttttagggtttgtaaagaaggtggagtagatattagtttgagtgttgggtttagtttattatggcgtatttaatgataaattaatatttttgatttttatgtgaaatttcgttttttttaatattggtttttatttttaaaagttattttgagaggtagacgttatttcggttttaggtagggtttgttttatgcggtgttatagtttatttggggttggggagtttttgatttttttttttttttggttaagtataggtttgttttttttttaaagttagttttaggcgtttttttttaggaagttttataggttttatttattagttttagggttgtgtttaatattgttattttttgtagtattcgtttttttttttatggtttagtttttggggtggttttttggttgggattggggttttggggtttttggtgatttttaggagtagggatagggttttttttttgtttttatggttttgttatattttgaggataaggattaggtataggtggtatggttgttgttgttcgaaatagagttggtagtgaaggtttggagtttttattttgggggttgagggaaggatagtaggagggataggaggggaggtatgtttgtttattcgattttgattttttagggagatagaatagttaagggtttggggtttttagatttttggttagttgtttttttggggcgaggaagggtttgggtttttgaggggaggagatgtgatagcgggagaggatagtggataggagtaggtgtgtttagaggggtttttaggggttgggatgggggttaggggagttttgagtttgtgggtgggtgggtatggtttgtgtgtgtgtgtgtgtgtgtgtgtgtgtgtgtgtttttgtgggggggaaattgtttgtgttgtagtgtgatggtatttagggtggtagttatatattttagggatttgttggtatataaagtcggggtagtttggtggggttcgggtcgtttggagagtaggtgttttgagcgttgggtttagtttatcgtgatatatttaatgataaatataaatttttaatttttatgggaaatttcgttgtttttaatattggtttttatttttaaaattttttaaataaatgaagttaaatatttttgggtgtttcgttaattttttaattgttattttgtagtttttgcgtggaggttgttatggaggttaaaggtagggtttgtagagtaggttttgttttggtttttttagtgttgttcgcgggatggggaagttttatagttttttgtgtttggttttttatttgggaaacgggtagaatgaaattatttttcgtcgggtttttgtgttgagtaatttttttcgtgaagttttgggtttatatggtagttatagtgtgggaattagtattgtttgaggggttgtggttagggatagtgggaggaagagttgggtttagttttttaggtttgtatttgtttgtgtaatgatgtttgggaggtttgagtttgtagtttgtattgtgtagtatgtgggtgtggcggttatatttcgaggttgtaaggaagttatttttttttaggaattttgttgtttttattttttttttgttggtttagggttgttttttagtttttgtgttataataggtttgatttgtatgtgttggcgttgttgtggttttttttaggttgtacgttttagaagtaggttacgtttttttgtttttggtttgagaagggtttttttagtatttcggggattttagtttttagattttggggtggttattgttttagaagtcgggttgagataggatttaatggggagggttcgtgggtagggtagaggtttgggtttttgggagatttggttttagagaaagaggcgcggtgtttatttttgtttcggttttgtaggtttggatggttttgtcgttagtttttttttttgtttaggttttaggttgagtattttttagagggttttagggatgtttagttttgttttgaaggtcgttgaggatttaggatggtttaatattgaatttatagtcgttggggacgttttgaggggagttatagtgtgtgtgtatgttttattttgggttaatttgtgaaagggtgaatagtttaggggtttagaaaatttaattttggggtaggtagaggtataggggagggtagatgatttagattttattttgatgggtcgggtagttattgtagaatttaattcggtgtagtaagttattgcgggtagttgtggtttagttttaggttttagatattgggaggggttttttttttttcggttgtgttatttttattaaagggtaagtgggttaggatagaaggagtaggaggtagagttgcggtttttttttagggaggtatttttattggatgattttgttatggttaagtttgatttaggtttattgggagttaaaaggtaaagaagaataaatttatatttgtttttagggagtttagtgttgagaggtttggtattgggataaattcgtaaattagagtttttgagggttggagggggtttttcggggtagggtataggttattgtagggatggtacggaatagggtagcggaaaaggtaggagttcgaggtttagggttttgtttttggcggttgggcgtttttggttatattgttggtgtttagagttttagtttttatagttgtgtagcgagaggaagttgacggtatcgattatggttgtggaggttttatgtgttaattgttgttgttttgtagg

SEQ ID NO: 92 - DNA, 8196 bp, Artificial Sequence
  chemically treated genomic DNA (Homo sapiens)
tttgtagaatagtaataattgatatatgaggtttttatagttatggtcggtgtcgttagttttttttcgttgtatagttgtgggaattgaggttttgagtattaataatgtgattaagggcgtttagtcgttagaggtagggttttgggtttcggatttttgtttttttcgttgttttgtttcgtgttatttttgtagtggtttatgttttgtttcgggaggttttttttagtttttaaggattttggtttgcgagtttgttttagtgttaggttttttagtattgggttttttgagggtagatgtgggtttatttttttttgttttttagtttttagtgagtttgggttaggtttggttatgatagggttatttaatgagggtgtttttttgagagggggtcgtagttttgttttttgttttttttgttttggtttatttattttttggtgagggtggtatagtcgggaggagaggggttttttttaatatttggggtttggggttgggttatagttgttcgtagtggtttattgtatcgggttgggttttgtagtgattgttcggtttattagggtggggtttgaattatttgtttttttttgtatttttgtttgttttagagttaagttttttgggtttttgagttgtttatttttttataagttagtttagagtgagatatgtatatatattgtggttttttttaaggcgtttttagcggttgtgggtttagtattaaattattttaagtttttagcggtttttagggtaggattggatatttttgaggttttttaagagatgtttagtttgaagtttggataagaaaagaggttggcggtagagttatttaggtttgtaaggtcggggtaaaggtgagtatcgcgtttttttttttagggttaggttttttaggggtttaagtttttgttttgtttacgggttttttttattgaattttgttttagttcggtttttggggtagtggttattttagggtttgggggttggggttttcgaggtgttggagaagttttttttaggttaagggtaggaaggcgtagtttgtttttaaggcgtgtagtttggaggaggttatagtagcgttaatatatgtaggttagatttgttgtggtatagggattgggaggtagttttgagttagtagggaaagggtggggatagtagggtttttagagggaaatgatttttttgtagtttcggggtgtagtcgttatatttatatgttatataatataggttgtaggtttaggttttttaggtattattatataggtaggtataggtttggagagttgagtttagtttttttttttattgtttttggttatagttttttaggtagtgttgatttttatattgtgattgttatatgagtttagggttttacggaggagattgtttagtataggagttcggcgggagatgattttattttgttcgttttttagatgagagattaggtatagaaggttgtggaatttttttatttcgcggatagtattgggagggttaggatagggtttgttttgtaggttttgtttttaatttttatggtagtttttacgtagaagttataaaatggtagttagagggttggcgaggtatttaagagtgtttggttttatttgtttagaaagttttaaaagtaggagttaatgttagaaataacgagattttttataaaagttaggaatttgtgtttattattagatgtattacgatgggttgggtttagcgtttaggatatttattttttaggcggttcggattttattaggttgtttcgattttatgtattagtaggtttttggagtgtgtgattgttattttgaatgttattatattgtagtataggtagttttttttttatagggatatatatatatatatatatatatatatatatataggttatgtttatttatttataggtttagagtttttttggtttttattttaatttttggggatttttttgggtatatttgtttttgtttattattttttttcgttgttatattttttttttttagggatttaggttttttttcgttttagagaggtagttggttagaagtttggggattttaggtttttggttgttttgtttttttgagaaattagggtcgagtagatagatatatttttttttttgttttttttgttgttttttttttagtttttaggatggagattttaagtttttattgttagttttgtttcggatagtaataattatgttatttgtgtttggtttttgtttttagggtgtggtaaggttatgggggtagaggagaagttttgtttttgtttttgggagttattaggagttttagagttttagttttagttagagggttattttagaggttgagttatgggaaagagggcggatgttgtaggaggtggtagtgttgggtatagttttggggttggtgggtgaggtttgtagagttttttgaaggaaggcgtttggggttgattttgggaggaaggtaggtttgtgtttggttaagagaaaaggaaaattagggattttttagttttagatggattgtggtatcgtatagagtaagttttgtttggagtcgggatggcgtttgttttttagggtggtttttaaaagtaggagttaatgttagaaagaacgaaattttatataaaagttaggaatgttggtttattattagatgcgttatgatgggttgggtttagtatttaggttggtgtttattttattttttttgtaaattttggaggggtttagttagaagggttattagttattggtttttgtttatttttttcgtaggcgtatttaaggcgtttttttggtttggaggtttgatgggtattatttttttttagttgttttgttttttggttgttagttgttttcggcgtatttcggggaggttgggtatttgttttgcgtagcgtggatagagggatcggggtttgttagtttttagggaggggaaggggagataaaagttatcggttttgttcgattagtttttttgcgcggttgtttagttggggcgggtatttattttttttcggttagtttcggttgttgttgtgcgttcgttttggatttatttcggggcggattcgtttttttcgcgtttgggttgtcgttaggagatggggttgtagcgcgcgggcgagtagggattgttcgagggcgggcgcgggggttgggggggtggggacgaggcgggtagcgttttatggggcgggcgcgtaggtaggaaggaggcgttggtgagttagatcggttgtattttttcgcggcgcgtatttgtcggggtaggagttgggtgtcgtcgtcggagtcgggttcgtttttcggaaagggttgcggttttcgcgcgttcgtttagcgtttcgatcggttagcggcgggggtcgggggaggagttatcgtttttttttttttttcggttcggttttgggcgcggggtttttttatttttttaggtttcgggttttaggttcgggtgcgcggattgtttcgggttggaggcggttttttagttttcgttcgtacgggaattttttttgtttcgattttgggtcgttagttaacgtcgggttgtgttgttgttgttgtttcgacggtcgttagtcgcgtattttttttttcgtttttcgtgttagcgcgaggtatgggtttagggagtgttttcggttcggtcgggaggtttgatttttcgttttagttttgttttgtagtttacggggtttttttagtttttaatttttaattttacgttgtatttagagggagagtcgaggaagggtcgggttttcggtgtattttttaataagttatttaaatttttttatagtgtgaatagtgatattttggagaggttagtgtcgatttggtatggattggtattcgatgttttgttatagttgtttttaataagttggttatagagttggtttttttttttcgttagttttttgagagtagtttttttattgttattgtttattacgggtgtttaggttagagaagggttttatttttttttttttttttgttttttttttttttttttttttagatggagttttattttgtcgtcgaggttggagtgtagtggtgtaattttggtttattgtaatttttgtttttcgggtttaagcgttttttttgtttgtttttcgagtagttgggattataggtgttcgttattacgttcggttaatttttgtatttttagtatattatgttggttaggttggtttcgaatttttgattttaggtgatttattcgttttggttttttaaagtgttgggattataggcgtgaattattatgtttagttagggttttatttttttttaggtttattggttagtaatgttaaataatattagattgttggtatagtattgtttaaattatgcggttttaagttatcgtgtttttttaataggttggtttttttttatgatattgagtttagtttattttttttgtttttgaagacgttgtattaattacgtgttagagagttttttttgatttttttatattttaagttggtttatgtgtttttataatttttgggttatggtttttatatggtatttgttatattggtttgaaatgatgtttaggaatttcgttatattgttggattgtgattttaagggtagttattttttagtatttagtattatgtttggtgtatagtaggtgtttaataaaagggtggttgagtgaatgggatggttatatagtttttttgagtttttatgttgttatttgtaaatagatttttttattgttattttttagagtgattgtaggggtgttggttgtaaatgtgtgagtcgttattttttttggttatttgagagttgttttgtatagagaaagtgtttagagaggtttgtttttggatttgggaataatgtggaaggagttttagtttggttgaagtatttagatttgtgtgtgttaggttagtataagtgttttgtggatttgagttattttagtaggtatttatttattttaaaaaatagaaatatggagtaggagtttagagaacggttaaaaatagtttgtttgaggggtttgggtttgttagtagtatttattagagaattagggggttatatatattttattgtgggtgggggttgaggtttttttttagagaagatttaggtttagagttggcgatgttttaggttattgggtttagtagtttttttttttttttattgtaaatttttttgaaaatgattagggggtttggagttttgtagtagttgagaggcgagatgttaatttagggaggttttattaagtaagataagttatgagtttttttggtttttcggagttttggggtttattatttggagttcgtatgtggatttggtagtggggagtttttgaattattttagattttgtgtaaattttgaggagtatttgattttagaatgtgggtttgttgggaggggagttttagtttatattggatttttaaataggttattggttttagaagtttaaatattgtatgtgattttttttgttgttgttattgagatggagttttattttattgtttaggttagagtgtagtggtgcgattttggtttattgtaatttttgttttttgggtttaagcgatttttttgttttagtttttcgagtagttgggattataggtgtatattattacgtttagttaattttgtattattagtagagttggggttttattatgttggttacgttggttttaaatttttgatgttaagtgatttatttattttagttttttaaagtgttgggattataggcgtgagttattgtttttagtttgtatgtgaattttataaaattaaaataaattttattatttttgtagttttagggttagagtgaggttggtttatagggggttttttaggttttgtaagagaggtgaggtttttggaataggatcgagtttaaggattttggattgttgtttttttatttttttgtattttttatgtggtttttagtaggttagatttgtttatttattagtttaattatttatttattttatgagtagttaatgagtttttatgttaaatgttggggatattaagatgaacgagaattacggtttgttttttttatttttagtttaaattaggggtttttaaagtaggttgagtattttcgaggtaggtgttagttgagattttatttttttttttttttttttttttgagatggagttttattttgtcgtttaggttggagtgtagtggtgtaatttcggtttattgtaattttgttttttgggtttaagcgatttttttgttttagttttttgagtagttgggattataggtacgtattattatgtttagttaatttttgtatttttagtagatatggggttttattatgttgattaggttggttttgaatttttgattttaggtgattcgtttgttttgtttttttaaagtgttgggattataggcgtgagttattgcgtttagttttgagtttttatttttatatttgagaatgtatattatttattggtagattggtatttgttttataaaagaataagttaaagaataaatagataggggatgtgtggtggaaagagtttagtgatttgtttggagagttcgtattaattatatgtttagattgggggtagaggttttttcggtgtagaattttggggtttgttttttttttagagttaaggggttgtttaataggtttttttttttttgagatagggttttattttgttgtttaggttggagggtagtgttacgatcgaggttttttgtagttttaattttttgggttttagtgatttttttattttagttttttgagtagttgagattataggtgtgtgttataaattttggataagtttttaatttttattttgtagagatagagttttattatgttgtttaggttggttttgaatttttgggtttaagtaattttttcgttttagttttttaaagtgtaaggattgtaggcgtgagttattatgttttaaaaagttgaaagaatataaaaattattcgtatttttattaattagatttaagaataatattttgttgtatttatttatatatttgttaaatatttgtatatttttaaatttgaagttgtatttattttgttattttattttaaatattttagtatgtattttttaagaatagttttttacgtaattttaatatttttttttatttttttgagatagaattttgtttttgttgtttaggttggagtataatggtgtaatttcggtttattgtagtttttgttttttgggtttaagtaattttattttagtttttcgagtagttgggattataggtgtatgttattacgtttagttaaatttttgtattttttgtagagacggggtttcgtcgtgttggttaggttggttttgaatttttgattttaggtgatttgttcgttttggttttttaaaatgttgggattataggtgtgagttattgagttcggtttttttttatatttaaggaaataatgtttttattaaatgatgtgtgatttagtttatatttaaatttttttagttgattttaaaatgtttattataaaggtttttttttgaatttgagtttaatttatgttatttattgtatttgattgttttgtttttttgttattttaaaatagaatttttattattttattttttgttttatattattttttttttttttttgagatagagtttcgttttgtcgtttaagttgtagtgtagtggtacgattttagtttattgtaagtttcgttttttaggtttattttatttttttgttttagttttcggagtagttgggattataggtattcgttattatttttggtaaattttttttttttttgtatttttagtagagatggggttttattatgttagttaggatggtttcgattttttgatttcgtgattcgtttgtttcgtttttttaaagtgttgggattataggtatgagttatcgcgtttagtttacgtttattttttttttagttagttttattttgttatttaggttggagcgtagtggcgagattttggtttattgtaatttttgttttttgggt

SEQ ID NO: 93 - DNA, 6811 bp, Artificial Sequence
  chemically treated genomic DNA (Homo sapiens)
cgatgagttaaagattaaataagtattattttattgtatgttataaaaggataatattatgtatagggtttgtgtataggattagattatgtacggataaaatgttttatttaaaagtatttatattttttattaagaaagttgaagatgagagtttttttttttttttttttatatttagaaagttagtgtattaatatatgatgaaaattttgaaaattagatatttttaataaggattttgaattttgagtaagtgatttaaagtaaagggaggatttaaagttgtttttaagagttagatattttttgttattgtttatgttttcgtgttttttggttttggttagtcgtagttttttagttttttgttgattttgtgattttgtgggtttttaatttttttttaagaattttttttttttttttttttttgagattgtgtgttattttgttatttaggttggagtatagtgatgtaattttagtttatcgtaatttttatttttagggtttaagtaatttttatgttttagttttttatatagttggggttatatgtgtgtgttattatgttaggttaattttatatttttagtagagacgggttttgttatgttggttaggttggtttcgaatttttgattttaggtgatttttttgttttggttttttaaagtgttgggattataggtgtgagttattatatttagttaatagtttttttttttatttagaatagttataatttgattttttatttgaaattagaagttattataatatgagataattgaggagaattagagttttgatttttgtttgtttatgaatttttttgaaaaagtgaggttggtttttttgttagtttttgttttagtttttatatttgtaaaatggggttagttttgtagtatgtttcgaggaaaattaatttgtgagatgtttttttatataggtttttttttttggagaatttaatggtatgttgttttattgagttttcggaaatttttttagtaagggatttaatttgattttaatttagtattttttaagtttaattatggaagttttgttttagaaaatattaatattttatagattgagttatttataaattattttggtaagagatattggttttagtagtttatttttttttgaatttgtatttgatattgatttttgttattaaatatttatgaggtttttaaggagtttttgtattaatttattaaagtaggaagtttttaaattttagagtatataaaaattatttgaggattttggtataatgtagattgttgagtattatataagatttattaatttagaattttttggaatagagataaggaattagaatttagaattattttatgggggattgtgttgtatgtagtttttagtttatagtatgagaaatattgttttatgtaataatttagtgaaaaatatttttaagtaatttatgtattttattattagaagaagttagaggttatagttataataatatattttattggtttgattattaattattttttgagatgttttaggtaagtttatagataatttgtgaatatttatttaaaacgtattgaatggttttgattttaattttaaaaagatgtaatattaaaatttaaatgtgtttgtaggtgttattatgagattaataatttgggtatatttagttaaagtgtgaatagttatagttgtatgtggtgttttatatttataattttagttatatagaaggttgaggtgggaggatagtttgagtttaaatttgaattaggagtttaaggttagtttgggtaatatagtgagatagtaagattttattttttaaaaaatagtttgagtgttttttttatttttgttatttatttatagtttatttatttttattataaatttatttagtgagaaattaaggttaaaggagtagggaagaaatttaagtaatttaattttatgattttttagtaatttagtttaaagattttaatgataggaagtttggaatgaataattaaaatgttatttttagattatttgtgaattttatttttttttattattataaatgatgaaaaattagttgttagaaattttaaagtaatatagtagaatatgatggaaaaataaattaattaagttattatttttcgaaatattttttttttattagaattttttaggtaatatgacgaagataataatattgtatttttttaaaatatgttgtatatttttttataggaaaaagggtgagttatggtgattagtgatattaattggaaataagtaaatttttggtttttgggttattagttgtatttattttaagaaaattttaaagatgatttgtagttttttagagagtttatttttatgtttatagtttaaaatgtgtagataatttgtttgtaaataattggtaggggttatagtgttatatttaggagattttattttattttatttcgataattagagttatagtttttttataattgagaagtggtaataaatggtattgtgtttattttttaataattttatagtattggtatttgatatatatttgtatgaattttatgtaataaaatgtagaaatttttttttttaaagggttttaaaatttttcgaaatagatttttgaattttattttattttttttgttatatggttgttttggattagtatatatattaatatttaaaaatagagttataaaaattagtgtatattttattaattttataaagttatatttttttttgtttgtatatatttatattttatttattattgtaattgttatttataatttagtaataaagagttgtattttagaatattatggaatggtgatatgatagatattttaaagtgtattgatatgtttttatgggaattagggatttaattttttttttttttgattgaagtattgtatgttttaagggtggttgtatttagtaggtttgtgatataatttttggaaaatatttaggttgtttaatggaagagttattaattagatattgaatatgatatttttgtgtttaaatttttaagtttttatatttattttaattaatttttaggttttttttttaagataattaaaaaataaaattataattgtttaaatttggaattaaggaaaggaaataaatattaaagcggagttggatttatttttatttatttagagtatattatttttagtagaattatgttgttaaggttgggattacggttttggtttcgcgaagggatttgttttgtagatttagggttcgtttaattttttagttgggtttttgttttgtttaattaattttgtgtatttcgttgtgcggtttatatttgaaagggggagtttcgatgttgtggtttattaattaggtattttttatttatttagttaatagaaagaaagagagagatcgcgttttttattttttttttttttttttttttaattataaataaggagacggaaattattaaataagaaggggggaaattttcgtatattttattttgatttggttggattggtttgttgtttttaagaggcgggtgttgtattaaaatgagaggttaaatttttcgaatgggaatcgtttttgtttttagagggaaaagagaattattatcgtgttaaattggaaatattgttttgtttttaatgcgggggattgagttttttttttcgatttagcgtggtaatgataggattcgaggaggcgcgttgttttcgggtagttgtttagtataatattcgtattttatttgtatttaaatttttgagttgtaagtaggtagaagtgttttttattttttttttttagttttttttttttcgttttgttgttgtttgtaattttttgtttcgtttattgggaaggtgacgtttaagattaaaagatttattgtaatttgtaaaagtttagagttattattagacgttggggaaaaatagggttgtttagtttagggttaaggttttgagtagagaaggagtagcgagaaatttcggttagtcgtttcgggaatagtttttgtagattggtttaattttttaaaggttagggatatcggggtagttttgtggtggggtagaggacgagtttttaattgtaagtaaagtgttgagtagagggcgttgggggtaggggaggttttttgattttattttgtatgtagtagttgcggggtagtgagtattttcgaataaagcggcgagtagcgcgggggtgagagattggggtttgttcgtagttgtcgttggcgttgagcgagttttttattattttcgcgagcgttggggtgtaaggattcgggggaggagggagaagggaacgaggcgtgttatttttgttgcgcggttacgttttaggagtttttgtgaacgatgggaatggtaattattagagttaagggggaaaagaaagagttggagtgagtaaaataaagagcgagtgtgggtcgcggtgattttatgttttattaatgtttcgtttacgttgtttcgagttgttattgttgtttttgttcgggttgtagtcgcgtttgcgggtagtcgaggcgaggcgtttcggtagcgtggggaggttttttagtaattttttgttttgagtgtattcggttattcgtaggtttggagtttttcggggggttagagtaggattatttttttttcgtttatcgtcggtttcgtttttttcgtattttagtcgtgtgtattttagagcgcgttagtaattcgggttttggattgcgggacgtttgagtcgcgtattgaggcgaaaaggataagggtacgtagttttcgtttcgcgaagtcgggtttcggtatttcgcggaatttttttttttgcgttcgtagtcgtaggttttatttttcgttagggagggagcggcgatgtttcgttttgtgtttgcgggtgtcggcgggtgtttttagggcgtttttagagtcgtttttttttgttgttggtatttcgagtttttttttttgttagttaggacgttgtcgatttgtttttgttcgttgtttcgtagacggggttgtaaagttgtaattaatggtgttggtttttttgtttatttgtggaagtaattgcgttgattgatgcgttatagattttttttttttcgatttcgtcggcgtttttttttatagatttagtattatttagtgaatgtatattagggtggttttttttttagtttcgggttttgtttgggtttgattgtgtttggtttttcgttaagttgatttatgtagtagaagttttatcggttggagagaaataaaagtttttttttttgtttcggagtaggttgcggagtttttgtagagttttttttttagtcgtcgtcggggtttttggtcgtcgaaggaggtgtttttcgcggagatcgcgggattcgtcgtgtcgagtcgggagggtcgtaggggttttgagatgtcgagcggtgttcgggttcgtttatttgtatcgtttgtttcgagtcgcggggttcgtttgttaggtttgcggaaaacgttttagcgatattcggttcgcgggtttcgaggtgcgttcgggaggcgcgagttcgcgttcggaaggtagttaggcggcgggcgcggggcgggttgttttgtattatgtgcggttcggttttggttttttttatcgttgtatttgtttgtttgtaaaacgatcggcgaggtttcgtttcgtttttttgggtagtttgggtgtttttatttgtttttggattgggttaaggtggtaagttgttttgttttgttttgttttttttttttttttaaaggttttgggttggtacgaagagttgttcggttagagtatttcggttaggtaagttgcggttattagagaattttaagggggcgggtgcggggtagcgttttttagtatagatggtttagaggttaggtgttaagtatttttgttttggagcgatagtaaggattaattattagaggagatattttgtgttatttttaggtgttgaggaagttttaatagaaaggaattttggaaaagagggtgttttgtttatagaagttatttaggggttttggtttatttttaagggtatcgtttgtatataatgttttttttatttttttaatatttgggtttattaaggattaatttgtttttaattcgaggttgtagataagttggttataatgggagtagtttttaatttttgagtttagaaaaagatagtatataagtttttgttattattagtgtttaatttgaatgaattatttatattggagggatattaatgttttaagttattattttttcggtttaaaaaaaaaaaatattatttaattgattttttattgagattaatttttgagatagagaagtagaaagaattttgaattaggattaatagttttttgtttaggtaaattatttgtgtaagagttattttaatgtggagaggttaattttttacgaaatgtattgtttttatttgtaaaacgaggtttattaataatatttgttttttttaaattataaaggaaagtttaagttaaatagtatatgagaaggtgttttaggatttttgatttatgaaataaaattaaatgtaaggtggtatattagattggattgttggaaaattatataattaagtaataggacgaattatgagtttaggatgagtttttaatggtttttaatataggtttaatatttatttttgttaatgtagtgatttttgttatattttttttttttt

SEQ ID NO: 94 - DNA, 6811 bp, Artificial Sequence
  chemically treated genomic DNA (Homo sapiens)
aaaaaaaagaaagtatgataagagttattgtattagtaaaaataaatgttgggtttatattgaaaattattaagaatttattttaaatttatgattcgttttattatttagttgtgtaattttttaataatttaatttggtatattattttatatttgattttgttttataaattaaaagttttaaaatatttttttatatgttatttgatttgaatttttttttgtgatttagagaaggtaggtattattaataaatttcgttttatagatgaggataatgtatttcgtaaagagttaatttttttatattaaggtagtttttatataaatggtttgtttggatagaaagttgttaattttggtttagagttttttttgtttttttgttttagagattgattttagtgagggattaattagatagtattttttttttttaagtcgaaaggatgatgatttaaagtattaatatttttttagtgtgggtaatttatttagattgagtattaatgatagtagaaatttgtatgttgtttttttttggatttaaaaattgaagattatttttattataattaatttatttatagtttcgagttaaaggtaagttagtttttagtggatttaaatgttagaaagatagggagaatattgtgtatagacgatgtttttaagaatggattagggtttttaaatgatttttgtaaataggatatttttttttttaaaatttttttttattagggtttttttaatatttaggagtaatatagagtgttttttttgataattagtttttgttgtcgttttagggtagaaatgtttgatatttggtttttaggttatttgtgttggaggacgttgtttcgtattcgtttttttgaagttttttgatgatcgtaatttatttggtcgggatgttttggtcgggtagtttttcgtgttagtttaagatttttggggaagagaagaaaataaaataaaataaaataatttattattttggtttagtttaagaataagtgaaaatatttaggttgtttagaggaacgaggcgggatttcgtcggtcgttttgtaggtagataaatgtagcggtaaaaaaagttagggtcgagtcgtatataatgtaaaatagttcgtttcgcgttcgtcgtttgattgtttttcggacgcgggttcgcgtttttcgggcgtatttcggggttcgcgggtcgagtgtcgttaggacgtttttcgtaggtttagtaggcggatttcgcggttcggagtaagcggtgtaggtaagcgggttcgggtatcgttcggtattttagggtttttgcggttttttcggttcggtacggcgggtttcgcggttttcgcgagaagtatttttttcgacggttaagggtttcggcggcgattggagagagggttttgtaagggtttcgtagtttgtttcgggataaagaaaagagtttttgtttttttttagtcggtggggtttttgttgtataaattagtttagcgaagagttaaatataattaaatttaaataaagttcgaagttgggggggaaattattttaatgtatatttattgggtgatgttggatttgtgggaggggacgtcggcgaggtcgaggggaaaaaagtttgtggcgtattaattagcgtagttgtttttataggtgggtagggaggttaatattattagttgtagttttgtagtttcgtttgcggagtagcgggtaaagataagtcggtagcgttttggttggtaagggaggaagttcgggatgttagtaatagggggaggcggttttgggagcgttttagaagtattcgtcgatattcgtaggtatagagcgaggtatcgtcgttttttttttggcggggagtggggtttgcggttgcgagcgtaggaggggaggtttcgcgaggtgtcggagttcggtttcgcggggcgggggttgcgtgtttttgtttttttcgttttagtgcgcggtttaggcgtttcgtagtttagagttcgagttgttggcgcgttttggggtgtatacggttaggatgcgagagaggcgaggtcggcgatgggcgggagaggggtggttttgttttggtttttcggggggttttagatttgcgggtagtcgggtgtatttagggtagagagttgttaggaaatttttttacgttatcggagcgtttcgtttcggttgttcgtaggcgcggttgtagttcgggtaggagtagtagtaatagttcggagtagcgtgggcgggatattggtgaggtatgaagttatcgcggtttatattcgttttttgttttgtttattttagttttttttttttttttttggttttgatagttgttatttttatcgtttataagaatttttgaagcgtagtcgcgtaataggaatggtacgtttcgttttttttttttttttttttcgaatttttgtattttaacgttcgcgggggtggtgggagattcgtttagcgttagcggtagttgcgagtaaattttaattttttattttcgcgttgttcgtcgttttgttcggagatatttattgtttcgtagttgttgtatataaagtggagttaagggattttttttgtttttaacgttttttatttagtattttgtttgtagttaggagttcgttttttattttattataaggttgtttcggtgtttttagtttttggagagttggattagtttgtaggggttgttttcggagcgattggtcgagatttttcgttgttttttttttgtttaaaattttaattttggattggatagttttgtttttttttagcgtttggtggtggttttgggtttttgtaagttatagtgggttttttgattttaagcgttatttttttagtaaacggaataaaaagttatagatagtagtaaagcggggagaggggagttaaggagagaaagtggaaggtatttttgtttgtttgtagtttagaaatttaggtgtaagtagggtgcgggtgttatgttgggtaattgttcggaagtagcgcgttttttcgggttttgttattattacgttaagtcgagggagggaatttagtttttcgtattggaaataaggtagtgtttttagtttaatacggtgatggtttttttttttttttaggggtaggagcgatttttattcgaggagtttgattttttattttaatataatattcgttttttagaggtagtagattagtttagttaggttaaggtgaaatatgcgggagttttttttttttttatttaatagttttcgtttttttatttgtagttaaaaaaaaaaaaaaaaaaaaagtaggaggcgcggtttttttttttttttttgttgattgagtgaatggaaagtatttggttaataaattataatatcgaaatttttttttttaggtgtggatcgtataacggggtgtataggattagttaagtaaagtaggaatttagttggaaaattaaacgagttttggatttgtaaagtaggttttttcgcgagattaaagtcgtgattttaattttagtaatataattttattggaggtgatgtattttaaataaatagaaataaatttagtttcgttttaatatttattttttttttttagttttaagtttgaatagttatagttttgttttttggttgttttaaaggaaaggtttaaaaattagttaggatgggtgtgaggatttgaaaatttgaatataaaaatattatatttaatatttgattagtgatttttttattgggtagtttgggtattttttaggggttatgttatagatttattgaatgtagttatttttgagatatgtagtgttttaattaaaaaaaaaaaaaattaaatttttaatttttataaggatatgttaatatattttaaagtgtttattatattattattttataatattttaaaatataattttttgttgttgggttgtaagtggtagttatagtaataaataaaatataaatgtatgtaaataagaaaggatgtaattttatgaaattgatgaggtatgtattaatttttgtaattttgtttttaggtgttgatatatatattaatttagaataattatgtagtaagaggaataaaatgaagtttagaagtttgtttcgggaaattttgaagttttttagaaagaaagatttttatattttgttatatgaaatttatgtaaatatatgttaggtgttagtgttatggagttgttgaagaataagtataatattatttattattattttttagttgtaaagaggttgtaattttggttgtcgaaataaaataaaatgaaattttttagatgtgatattgtgatttttgttagttatttataaataagttatttgtatattttgggttgtaaatataaaagtaaattttttgaaagattgtaaattatttttagggtttttttaaagtaaatataattagtggtttaggaattaaaagtttgtttgtttttagttaatgttattggttattataatttatttttttttttatgaggaaatgtatagtatattttaaagaaatgtagtattgttattttcgttatattatttgaagaattttaataaaggaaaaatgtttcggaagatggtgatttgattaatttgtttttttattatgttttgttatattgttttgaaatttttgatagttaattttttattatttgtggtaatgagaggaaatgaaatttatagatagtttaaaaataatattttagttatttattttaggttttttattattagagtttttgagttgagttattaaaaagttataaaattaaattatttaaattttttttttatttttttaattttgattttttattaagtgagtttatggtgagaatgaataagttatagataggtagtaggagtgagggagatatttagattgttttttaagaaatggaattttgttattttattatgttgtttaaattggttttgaatttttggtttaagtttgaatttaagttatttttttattttagttttttgtgtagttgggattataggtgtaagatattatatatagttgtggttatttatattttaattagatgtgtttaaattattgattttatagtggtatttatagatatatttgaattttaatgttatatttttttgaagttgggattagagttatttagtacgttttgggtgggtatttataagttatttataagtttgtttgagatattttagaagatgattaatggttagattagtgagatatattattgtgattatgatttttagttttttttaatgataaagtatataaattgtttgaaggtattttttattgaattgttatataagatagtgttttttatattgtagattgaagattgtatataatataattttttatagagtaattttgagttttaattttttgtttttattttaggagattttgaattagtagattttgtatggtgtttagtaatttgtattatattaaggtttttaaatggtttttatatgttttgaagtttaagaattttttattttaatgggttaatatagagattttttaaaggttttatgagtgtttaataatagagattagtgttaggtgtaaatttaaagaaaaatgaattgttggagttagtgttttttgttaagatagtttatggatgatttaatttgtgagatattaatgttttttgaaataagatttttatgattaagtttgggaaatgttgaattaaagttaaattaaattttttattagaggaattttcggaaatttaatagagtagtatgttattagattttttaaaggaagaaatttgtatgagagaatattttatagattaatttttttcgaagtatgttatagagttagttttattttataaatgtggaaattgagataaagattggtaaagaaattaattttatttttttaagggaatttatgagtaggtagaaattagagttttgattttttttaattattttatattgtgatgatttttagttttaagtaaagagttagattatggttgttttaagtaaaaaaggaaattattggttgggtgtggtggtttatatttgtaattttagtattttgggaggttaaggtaggagaattatttgaggttaggagttcgagattagtttggttaatatggtaaaattcgtttttattaaaaatgtaaaattagtttggtatggtggtatatatatgtagttttagttatgtgagaggttgaggtatgagaattgtttaaattttggaggtggaggttgcgatgagttgaaattatattattgtattttagtttgggtaatagaatgatatatagttttaaaaaaaaaaaaaaaaaggaaatttttgaaagaaaattgggagtttatagaattatagaattagtaggaagttgggagattacgattaattaaggttagaaaatacggaggtataagtagtagtaggaagtgtttaatttttaagaataattttgaattttttttttgttttggattatttgtttaagatttaaaatttttgttgggaatatttagtttttagaatttttattatatgttagtatattggttttttgggtgtgggaaaaggagagaaggggtttttatttttagtttttttggtagaaaatatgggtatttttgaatgaaatattttattcgtgtatagtttaattttgtgtatagattttgtgtatagtgttatttttttatagtatgtagtaaaataatatttgtttagtttttaatttatcg

SEQ ID NO: 95 - DNA, 5937 bp, Artificial Sequence
  chemically treated genomic DNA (Homo sapiens)
ttggatttatttaatttatgtttgaatgagtaaatttgtggtttggttgtggttgttataattatattttgatttttagtgtttgttatttataggttggtggtgggtttttttttatgtagaatattttgtgatgtgggagaatgatgttgtgtttttttagggagttggttggataggtttatgggaggtagtaatttggcgggatatgtgagttttattgggttttgttggaaaggggtagaaagataatatattcgtggaataggatttgtgaatttgtgttaatatttttgtaagtttaaataaggaataaggaagattttaatggatattttatatgtgttttttttataatttgaatttaattggaatgaagaatgggaagaaagaattatttttttttcgtttattttttttttttttttttttttttttttttgagatggagtttcgtttttgttgtttaggttggagtgtaatggtgttattttatttcggtttatcgtaatttttgttttttaggtttaagtaatttttttgttttagttttttgagtagttgggattataggtatgtattattacgtttggttaattttgtatttttagtagagacggggtttttttatgttgaggttgttttcgaatttttgattttaggtaattcgttcgttttggttttttaaagtgttgggattagaggcgttagttatcgtttttagttttatttatttttaaaatttatagtattattatttttttgaaatatattttttatttagtagtgttgaagattagtattgtggtgttgtttattatatttttggtatttataaaatatttggtaaattaataattattttttttaagatttaagaaggaaaatttttaaatatagaaaaatgtcgaagaattttgtagtgaatattattgtaatatttaaattttattattaagattttattggttgggcgttgtggtttatgtttgtaattttagtattttgggtggttaaggtaggaggattatttgaggttaggagttttaaagtagttatggttaatatggtgaaattttatttttattaaaaaatataaaaattagtcgtgtatgatggtatgtatttaattttagttgttcgggaggttgaaataggagaattatttgaatttgggaggcggagattgtagtgagttaagattgtgttattgcgttttagtttggataataggttttgttttaaaaaaataaaaaaagattttattattttgttttagcgtgtaattatttatttagttattttttttgatttttttaattttgtatgtattttagtgttagttgtagatattattttattttttcgttaaatgttttagtatttatataattggaggtgaatatttgtttataatttttttttttttttttgaatatttaatgaaatataattttaaatgtattatttaataaattttgataaatgtatatatttgtgtagtttaaatatttattaaaaatatgaaatattattttataatgttattagaagagttttaagtttattttagtgaagttttgtttttatttatttatttttaaaattatttttgtgatttttttttattagttttttttgttttggaatttcgtataaataaatttatataggatgtagttttttgtgtttggtttattttatttaatataatattttttagattatcgatgttattgtttataatagtagtttttaataaatattgattagtttattttaattatagtgttgattaattaaggattatagttgattagatgtatttaaatatagttaatatagtttgaatgttttttataaagtttttgtaggtttagaattgttatatgttgttgattagataaaagtggggtaagttttttgggaaaagaaaaaatgaggtatttattatttttttagaattaaaggaaaagatatttaaggatgatgtttgagtatacgagataggttagatagtaattgattataagttttttttttttttttaggtgtaggtatgatagttaaagatggtattttttataggaaggttgttttggaatatttatttatatttggaggttatattttaaagtaggataagttttgttaagggggaatttttgtattttagttttttcggtagtagttttttattttttaaggagggggtttgataatcggttttaaggaagtagaggatagagtttttatttagtgtttgttgtggtaaacgtgattggttttttgggggagttttaattatttggaagagttttaattgaaaatttttaaaagaattttttttagtttataattgttttttttaaaagtgggtttttaggtttaggaagggtgtgggattttgtgttatgtgatataaaaattttgtgtttattagtgatttgatatttttgttaggtgtaattaggtagtttttattttttagagtttatatttttttttttattagttaaatgggttaaatttattggtggattggaggtgatattagtttgtatgtggtttagattgtaattggtggtatttgtaattttaggtagtttttttaggtgaagttaggtggagatttaaatattttaattaaaggtttggtttcgtagttttttttttgagagttgtggggggtataaggtatagaattaaaatagggttcgatatagggaattttaaggagtgtgttttttaagattatattagttttttttagtattattttgttttttttttttttttttttttttttgagatggagtttcgttttgtcgttaggttggagtgtagtggtatgattttagtttattgtaattttcgttttttaggttgaagttattttttttttttagtttttcgagtagttgggattataggtatgtgttattacgtttagttaatttttgtatttgtagtagagatcgggttttattatgttgattaggatggttttaattttttgatttcgtgatttattcgtttcggttttttagagtgttgggattgtaggcgtgatttatagttcgcggtttattttatttttaaatcgttatttagtatttaaatttagggatatttgggagtagaaattagaacgggatagataagtggggagattggtgttgatggaaattttagtgagaaaagtgtagatgggattatagttgataattggttgttttgatttaggataattggggaaagggaggttggggtatattgaaatatttaggttgtcgttgtttattttagttgttaatatgattagttgtaaatttgttttgtttttagaaattttttttttaaaatatggattttttcgttagtgtttaagatgggatatattattattaagtaagtattttttttaggagtattttttaggttgttaaaatgttaagatttttaattatttttggtagttttgaatttatgtaaagaggttagttagttgttttagtttattttttagaatgatgagatttggtattgaaaatattgtttatattgagttttttattaaatgtaataagtagataattataaatatttatttttttatgtttataatttagtatgttggaaattatttttttttgatttattgttagtttattacgttttatatttaggagaatttaagttttaaatcggtcgttgaatagttacgtttttttgtaggatatatttattattagggttaaaattttgtttattttttaaaggaagtcgatgtttttatataaaggtttttttaaatgtaatagtaagttcgtgggagaggggttagtagaggttacggttagtttacgggtttttttcgattttgattatgattaggagtgtagttgttaattgcgaggtttgttttaaggtggaaaatagtatcggtttttattgttattttagagaaggtaagtttcgcggttggcggtgttggggatacggttttttttaggtttattttttgttatttagagagttgttcggaggtcgtttataggtgtaatttcggtattgcggtcggggcgtcgggtcggggagggcgtttaagtttattagtattttcgtcggttttttttaaagtttgaatagggtttcggcgtgttcgtcgttttttattttcggttttttcgcgtttttgtttcggcgcggtttggataggaagttgggagtttttttaggtttcgtagattcggatttgggagggggtgggacgcggtcgaggttttttttcgaatttgcggtaagtttggttttaggaaagttttttaaagtttttagtagcgtttgtttaggtcgttttcgcggggcgagtagacggcggtaagcgcgttagtttcgtcgtcgtttttgtcgttagtagagcgttttgggcggttcgttcgcgggaagcgggtcgaattttcggcgggtaggtaggtttttttttcggggcgaaagtcgtagttgacgtaggcggttcggaaggcggaagttgtttcgtttcgatcgtttagttagcgtcgcggcgtttatatttggggtttcgacgcgcgggtaaaggcgtacggttcggggcgttcgagggggcggttttcgttgggggtttttaggcgtttttgagtaacgattttttttaagtattttttcgtattttttttttttttttggttcgaagttttcgagggcgggggttggtgtggggttttggtttttttacgtcgttttgagtatttcgttgtttttaattttttttaagttttttttcgtattattttttttttagtaacgtgaaggggaggggcgtgtttagggtgagtacgtttttttatgaatattaataagcgcgtatgcgttttgttcggcgtgttgggtagaggtggttagtttcggtcgttgttgttagacgggtttttcgggttttttttcgagagtcgggcgggtacgcgttattgtgttatttgcggtcggttcgcgagttaggttggtttttttttttttttttttttttttttttttttttatgtagttgatttaaaagggaataaaaggttgcgtataattataataataaaagaaggggagcgcgagagaaggaaagaaagtcgggaggtggaagaggagggggagcgttttaaagaagcgattagaataataaaaggaggtcgggttttttgttttttggaacgggtcgtttttgaaagggtttttgaaaagtggtgttgttttttagtcgtgtatgttttaatcggcggagtatattagagtcgggacgcggcggtcgtaggggtagcggcgacggtagtatcggcggtagtattagcgcgaatagtagcggcggcgtttcgagtgttcgcggcgcgcggcgtagcgatgcgttttttacggacgcgcggtcggttcgggcgttttttaagttttttgttcgttttgttttgtgttttgcgagttaaggtaggagttttttttcgggttttttttttagtcgtttttttttttttttcgcggcgttttgggcggttgagtttcgcgagtaggttcggtagttttcgagcgttcgatttttcgtttttgcgttcgagcggttgtatttgggttgagcgcgttaatttttttacgggagtttttgttttttgagggtgatttttttaggtcggataggggcgcgttcgtttcgttgttgtttttcgggaagtcgtcggatttttttcgtattcgtgtatttttttttttttttgtttcggaattatgttgagtttttgaacgtagtttcgtaaaattatttttattcggcgaggagggttcgtcggggcggggagtgggagggagtcgttatttttatattcgaagaaaatagttttttttcgcgttgatttatttttttttttcgtcggtagg

SEQ ID NO: 96 - DNA, 5937 bp, Artificial Sequence
  chemically treated genomic DNA (Homo sapiens)
tttgtcggcgagggaaggaggtaggttagcgcgggagaaagttgtttttttcgagtatagaggtggcgatttttttttatttttcgtttcgacgagtttttttcgtcgagtgaaaataattttgcgaaattacgtttaaggatttaatatgatttcggggtaaaaaaaaaaaaaaatgtacgagtgcggaagaaattcgacgatttttcggggggtaatagcggagcgaacgcgtttttgttcggtttggaggggttatttttaggaggtaggggttttcgtgggggagttggcgcgtttagtttaggtgtagtcgttcgggcgtaggggcgaggagtcgggcgttcgagggttgtcgagtttgttcgcggggtttaatcgtttagggcgtcgcgaggggagggagaggacggttgggagggaggttcggagaagggtttttattttggttcgtagggtatagagtagggcgagtaggaggtttagggggcgttcggatcggtcgcgcgttcgtggggaacgtatcgttgcgtcgcgcgtcgcgggtattcgggacgtcgtcgttgttgttcgcgttggtgttgtcgtcggtgttgtcgtcgtcgttgtttttgcggtcgtcgcgtttcggttttaatatatttcgtcgattggagtatgtacgattggaaaataatattattttttaaaagtttttttaagagcggttcgttttagaaggtaaagagttcggtttttttttattattttgatcgtttttttgagacgttttttttttttttttatttttcggttttttttttttttttcgcgtttttttttttttattattatgattatgcgtagttttttatttttttttagattagttgtatggaaaaaggggggagggaggggagaaaaaaaaaaattagtttagttcgcgggtcggtcgtaggtaatataatgacgcgtgttcgttcggttttcggagaaggattcggagagttcgtttggtagtagcggtcggggttggttatttttatttagtacgtcgggtagggcgtatgcgcgtttattaatatttatgagagggcgtgtttattttgggtacgttttttttttttacgttgttggggagggggtagtgcgaggaggaatttggaaggggttgggggtagcgggatgtttagggcggcgtagaagaattagggttttatattaattttcgttttcgggagtttcgggttaggagggaagggagagtgcggggaggtatttggaagggatcgttgtttagggacgtttggaggtttttagcggggatcgttttttcgggcgtttcgggtcgtgcgtttttgttcgcgcgtcggggttttaggtgtaggcgtcgcggcgttgattgagcggtcggagcggggtagttttcgtttttcgaatcgtttgcgttagttgcggttttcgtttcgggaggagggtttgtttgttcgtcgggagttcggttcgtttttcgcgagcgagtcgtttagagcgttttgttggcggtagaggcggcggcgaggttggcgcgtttgtcgtcgtttgttcgtttcgcggaggcgatttgggtagacgttgttgggaattttgaaaaatttttttggagttaggtttgtcgtagattcgaggggaagtttcggtcgcgttttatttttttttaaattcgagtttgcggagtttgggagggtttttagttttttatttaaatcgcgtcggggtagaggcgcggggaaatcgggggtagaaggcggcgggtacgtcggggttttgtttaggttttgggaagggtcggcggagatgttggtgggtttggacgtttttttcggttcgacgtttcggtcgtagtgtcgggattgtatttgtaggcggttttcgagtagttttttgggtggtaagagatgggtttgggagggatcgtgtttttagtatcgttagtcgcggaatttgttttttttggggtggtagtggaaatcgatattgttttttattttgaggtaagtttcgtaattaatagttatatttttggttataattaaggtcgaagaaagttcgtgggttggtcgtagtttttgttaattttttttttacgggtttgttgttgtatttgaggggatttttatatggaaatatcgattttttttgaagggtggataaagttttggttttaatagtaggtatgttttgtagaaaagcgtgattatttagcggtcggtttggggtttgagtttttttgggtgtggggcgtgatgggttggtaataggttaagggaaaatagtttttaatatgttgagttatgagtataaaagggtgggtatttgtggttatttatttattgtatttgatgggaggtttagtatgaataatatttttagtgttaaattttattattttgaggaataaattagggtagttaattgatttttttatataggtttaaagttattaaggatggttaggagttttggtattttaatagtttaagaaatgtttttaagaaaagtgtttatttagtggtaatgtgttttattttgagtattggcgggagaatttatgttttggaagggaggtttttaagaatagagtaagtttatagttggttatgttagtagttggggtaggtagcgataatttgggtgttttaatgtgttttagtttttttttttttaattattttaaattaaggtaattagttgttaattgtaattttatttatattttttttattgaggtttttattaatattagtttttttatttatttgtttcgttttaatttttatttttaagtatttttgagtttgggtgttaaataacggtttaaaagtaaaatgggtcgcgagttgtgggttacgtttgtaattttagtattttgggaggtcgaggcgggtggattacgaggttaagagattgagattattttggttaatatggtgaaattcggtttttattataaatataaaaattagttgggcgtggtggtatatatttgtagttttagttattcgggaggttgagagaggagaatagttttaatttgggaggcggaggttgtagtgagttgagattatgttattgtattttagtttggcgatagagcgagattttattttaaaaaaaaaaaaaaaaaaaaaaaaggtaaaatggtgttgaaaaaggttggtgtgattttaaagagtatattttttggagttttttatgtcggattttgttttaattttgtgttttgtgttttttatagtttttaggaaagaggttgcggagttagatttttagttaaagtgtttagatttttatttggttttatttagaagggttatttgagattgtaggtgttattagttgtaatttgggttatatgtaagttggtgttatttttagtttattagtgaatttagtttatttgattgataggaaagaaaatataaattttgagaggtgaaaattatttgattatatttaataagaatgttaaattattgataaatataaaatttttatgttatatagtatagagttttatattttttttgagtttgggaatttatttttagagaaggtagttgtgggttagagggaatttttttgaaaatttttagttggggtttttttaaataattgggatttttttaaaaagttagttacgtttattataatagatattgagtggaagttttattttttgtttttttgaagtcggttgttaggttttttttttagagaatgaggaattgttgtcgagagaattgaaatatagagatttttttttggtagggtttgttttgttttggggtatagtttttaagtgtaaatgaatattttagaataatttttttgtggaaaatgttatttttagttgttatatttatatttgagagaaggggagaggtttgtagttagttattatttgatttgtttcgtgtgtttaaatattatttttggatatttttttttttaattttaaaaagatgatggatgttttattttttttttttttagaaaatttgttttatttttatttagttaataatatatagtagttttgaatttgtaaaagttttataagagatatttaagttatattagttgtatttaagtatatttaattaattgtaatttttggttaattaatattgtggttaaaataagttaattaatatttattgagaattgttattataagtagtaatatcgatgatttaaaaaatattatgttaagtgaaataagttagatataaaagattatattttgtatgaatttatttatacggagttttagaataggaaaaattggtgaaaaaagattataagagtgattttgagggtgggtgggtgggagtagagttttattgggatgggtttgaggtttttttggtggtattgtggggtaatgttttatatttttgataggtgtttgggttatataggtgtatgtatttgttaaaatttattaaatagtatatttaagattgtattttattaggtgtttaaaagaggaaaaaagaattgtgaatagatatttatttttagttatatgagtgttgaagtatttagcggggaagtggaatgatatttgtaattgatattgaaatgtatataaaattagagggattagagaggatggttgggtgggtggttatacgttgaagtaaaatagtaaagtttttttttgtttttttgagatagagtttgttgtttaggttggagcgtagtggtatagttttggtttattgtaattttcgttttttaggtttaggtgatttttttgttttagtttttcgagtagttgggattagatgtatgttattatatacggttaatttttgtattttttagtagagatggggttttattatgttgattatggttgttttaaaatttttgattttagatgatttttttgttttggttatttaaagtgttgggattataggtataagttatagcgtttagttagtaaagttttaatggtagaatttaggtgttatagtggtgtttattgtaaaatttttcgatatttttttatgtttgaaaatttttttttttaaattttggggaagatagttattgatttgttaggtattttgtgggtgttaagaatatggtgggtaatattataatattggtttttagtattattgagtggagagtgtgttttaaaggaatggtgatattgtagattttaagagtgaatgaggttgggagcggtggttgacgtttttaattttagtattttgggaggttaaggcgggcggattatttgaggttaggagttcgagaatagttttaatatggagaaatttcgtttttattaaaaatataaaattagttaggcgtggtggtgtatgtttgtaattttagttatttaggaggttgaggtaggagaattgtttgaatttgggaggtagaggttgcggtgagtcgagatgagatggtattattgtattttagtttgggtaataagagcgaaattttattttaaaaaaaaaaaaaaaaaaaaaaaaaaagagtgaacgaaaggaaagtagttttttttttttattttttattttagttaggtttaaattgtagagaaggtatatgtaaaatatttattaagattttttttattttttgtttgaatttgtagagatgttaatataagtttataaattttgttttacggatatgttatttttttgtttttttttagtagagtttagtgaagtttatatgtttcgttaggttattgttttttatgaatttgtttagttagttttttaaggaagtataatattatttttttatattataagatattttatatggaaaaaaatttattattaatttatagataatagatattgaaaattagggtatagttgtagtaattataattaggttataagtttgtttatttaagtataagttgagtagatttag

SEQ ID NO: 97 - DNA, 5367 bp, Artificial Sequence
  chemically treated genomic DNA (Homo sapiens)
taacgtgattagggaagggatgttttgttgcgggaggggttacgggcgtgtatattaggtgggaattcgggtgggagagggtattttagagttttgtttattggagggttggagggagtagagtggagagggtgggttggagggtggtagaagggttagggggttagcggggttagcgtgggtgatttagtagattttgttttaattcgtaggtttggagtgggattgattggttttagatagattatgttttatatagaggtgatagatgtttagcgtagcggtttaggtgggggtttggtggaggagggtgagtttattgaggtggtgtatttgtttttggaaggcgtttaggtttttgtagacgattcggatatttttaagattttcggcgttatttttggtgttttatggttttttagttaggtggtttttaatttggatttttagtgagattttagggttttagatagaggttagttttggttatttattttatatttcgcggattttaataaaggtttgtatagttttagtttttgtttgttggttttgagttttgtgattagggttttggagaggattggggaaggggcgggaagtagtgattttgatttgagatggttttcgggatacggcgagtttttttgtaggaggagtagttggtggtaggttatgtaggtggttgttgtggggttgaggataggtttggggatgttatgggtagggttaggttgtgtttttttttggagttgggaggggtggggttcgggatttatggagggtggtatggtaggtttgggggtgggtttgttggttacggggttgtagtatgagttgtgtttacgagagtggtggttgagttagtttttaggagttaggatggggtgggtagtattgtaggttgtacgttgtagggaaagtatgttttttgtttttggggtaagtgaggggtttttattttgattggggttgggttagagttattttataggagttcggagttaaagttgttttgtgtcgggggttttagtagttgattcgtgtatttttagttttggaagttttttaagggatttttttcggtttgtggggtatgtagaaatgtttgtaggtttgttttaagaggagtaggtggcggtatagggtggggatataaggttagtggttttgatatgggttaggtttttggtgttagttcggttttggtttcggggtacggttttagtttgggtcgtttagtattaggttttattggtttttgagtatttttggtttgtatgttttggttttgttttttgatttgttttgagggtggggttgtgggagatgcgtgtagtttagagttgttttttaggtgtttagaatgtttgtgaggtaggaggggatttagttcgtttggtttgttttttgggttataggtgtatagtaagggttttgtaggtgaatgggtgtgttggtattggttgtgggtattcgagggtattgttgggttattagtttgcggtaggatcgattcgtttttggatattattaggtttaggttgtggtttttaggaggaaagtagagaaggggatagtgaagtgaagggagttttagtattttgtagggtggaattttgggtagggaggtggagattgattttttgttgttatttagtatagtgttggatagtttggtattggaggttgttttgaggaggttgtgttttaggggtttataaaagtagtgttatttgtatgtaaatgttggttgtggtttaggtggggttttgtgggtattagtaaggttagcgatagggttgtcggggaggggttgttaggtatggggtgtgtgttagggaggggttgttaggtatggggtgtgcgggttttggttagttttagttttattttatttagatgaggttttagtaggatatttataggataggagttttgtttgatttatagtagttttgttgtgttgtttttattagtagtttgtttggtgatattacgagagtgcgatgggtttttcgggttgattagtagaggttttttattattttagagggatttttcgtaggtattaggtgggtttggtttttgaagtattgaggggataggtgatagggtattcggatttgggtgtagtttagttttttattttgtttcgtagttcgatggggtgggttagtaggtagtgttgtcgggtttaatggagttggtattgatttttcggtattggagggggggttgtaatcggaaattttttttttcgtttgttatatttagtattgtaggatttagcggaagtatagtttattttggagtttcgtcggttttgtttaaatttttggtagttcgtttttagtttggtttttaggattgttttatgggtttagagtttttggttaggttgagtagttgtatttttgttttttgtatataagttgggtatcgtttagcgtttagagtgggagttttttaggttgggggacgggtggttttgggaggttggagggtgttgtggtttagtgggttttagaataatgacgaggttttttattagaagagattaggtagtttggtttggtgagggttggggttggagttttggtcgttattgattttagttttttattttagtaaggtgtagtagggggtaaatgtgttttgtgaaatatgtatgaggggcgagggtttttattgttgttttttggaaatttaaattagggtttagttgtttggtatttttggtttaagggttgttgaaatttttgtagggaagggatttttttttcgatgttttttatgttttttttttttttaagggtaggtgcggttatttttttgatttgggtgtttttatggatatcgtgaggtttggttgatttatgttcgtttacgttttggcggttttttatgttagtttttgtatgatttgtttaagttttttgtttattttcgggttgggggtttttgagggtgtgtaggggcggagttttttttgtttattatttggttaagtgtttagtagaggtatttagtatttttttttttattatagtggggtagtgggcgtaggtggggatggagttttgggtttttggagtcgggtagggggtttttttgttttggggtttttttttttcgagtattcgagtatttgtttttaggttaaagtataggagaggtggtatttttatagggagttttttttttcgtaggcggtaattatcgtttatatatcggaaggcggtaattggaaggttttgaatatagtttggatttttttgtttggtgggggtttttgtgcgggttttattttggtttgtgttttaatttttacgaagtttatttattattaagtttggggtgggtattttgagtagagttagttgaggtgggtatggggggtttttatttatttttttagggatttttagttgagtttgcggtttggattttggaggagttgttaaatagggatggagtaggtagattttgcgtatggggtgtttataggttttgtgtttttaaagttttttttttttagtttttagttttagtagtatggtggtagtgatttgttttaggttggggggttgtatagttatttagtttcgggtatagggtaaatttgcgagaggagttagggggagagaagatagtttagttattatggggatgggttgaggatttttttggattatatggggatttttaattattaaggtgatttttagttttggaaaggatcgtgtttattggaggagaggaaggtgttattggttttgattttgtggaggagttgcgaggttatttagggagagggtaaggaggtgatcgtagaggatggggtgtggaagtttggtgattagggtagtagtgggaggtttttttcggggtagtttttagggataggtattgtcgatttttgttttttatttttcgtttttcgttttttaagtttagatttgagtttggggggcgagaggcgggaaacggggaatgtggtttgagtattttttgagggtatggtttggttatttcgacgttagcgtcgagttgagtagtttgtattttggagtatttgttgattggttgtttgattagcgcgtttcgtagaggggaaggtaggggcgtcggaggggcgtagcgttttttgtagtcggcgtggaggcggtaggagcggcgcggagaaggggagattttcggaggaggtggggggcgcgtagtaggggttgggttcggttttggttttagggtcgcgttatttcgcgtgggggtcgagttttgattagagtaggaggcggtattttttttgggattgcgaggagcgcggcggtggcgtattgatgggaggggattatacggtaatttcggggcgttttattttcggtttttgatattcggtaggagtttaggcggaggaggggaggtagttttgcggcgtcggcgtacgtttcgtcgatttacgcggaggtgtgagcggggttttcgcggttcgcgttgatttcgaggtttcgtgttttcgtcgttcgggcgttttggggggcgcgcgtcgggtcggggcgttggtaggcgacgttttttatcgtttttaaagtttggggcgttttcggattttttttcggttttatttcgcggcgcggtttcgtttttttatgtatatgtaggtgcgcgggtgacgaatgggcgagcgagttgttagtttcgtttcgaatttgttggttgcggtgtcgggagcgcgggcgcgtagagtcgaggtcgggattcgttgtttttatcgtcgtcgtcgtcgtcgtcgggtgggagtcgggtcgggtagtcggagcgcggtcgttagcgagtcggagttgtcgtcgtttttgtacgttcgtcgtttaggttcgcgcgtcgcggcgttgcgttcgatttcgttcgcgtcgtcgtcgtcgtcgtttttgtcgttgtcgttgtttttgcgggcgttcggagggcgggcgggcgttgggaggtcggcgcggcggttgggagtcgggcgcgggcggcggcggcggggtcgggcgggcgggtcgcgggggtaatgcgggcgtagggtcgggggcgtttttttcggcggttgttgttgttgttggcgttttgggtgtaggtgagcggggcggcgggggcggcgggggtcgcggacggggtatatcgggtcgtttttaggggtcgggcgggtattgtttggggtcgtcgtggttcggaagttttcgaggttgcgcgcggcggttggggtttcgggcgggcgcggttgggtgggggcggggcggcggggtttgtttttttatttttggcgttcggttcgtcgatttcggttcgcgttttttttcgttttttcgttgttttatttttagg

SEQ ID NO: 98 - DNA, 5367 bp, Artificial Sequence
  chemically treated genomic DNA (Homo sapiens)
tttaaaaataaggtagcgggagagcggagggaggcgcgggtcggggtcggcgggtcgggcgttaggggtgggggaataggtttcgtcgtttcgtttttatttagtcgcgttcgttcggagttttagtcgtcgcgcgtagtttcgagggttttcgaattacggcggttttaggtagtgttcgttcggtttttaggggcggttcggtgtgtttcgttcgcgattttcgtcgttttcgtcgtttcgtttatttgtatttagagcgttagtagtagtagtagtcgtcggggaaggcgttttcggttttgcgttcgtattgttttcgcgattcgttcgttcggtttcgtcgtcgtcgttcgcgttcggtttttagtcgtcgcgtcggttttttagcgttcgttcgtttttcgagcgttcgtagaggtagcggtagcggtagaggcggcggcggcggcggcgcgggcggggtcgagcgtagcgtcgcggcgcgcgggtttgggcggcgggcgtgtaggggcggcggtagtttcggttcgttggcggtcgcgtttcggttgttcggttcggtttttattcggcggcgacggcggcggcggtgaaggtagcgggtttcggtttcggttttgcgcgttcgcgttttcggtatcgtagttaataagttcggaacgagattgatagttcgttcgtttattcgttattcgcgtatttgtatatgtatgagggggcggggtcgcgtcgcggggtggggtcgggggggggttcgggggcgttttaggttttaaaggcggtggagggcgtcgtttgttagcgtttcggttcggcgcgcgttttttagggcgttcgggcggcgggggtacggggtttcggggttagcgcgggtcgcgggggtttcgtttatattttcgcgtgagtcggcgaggcgtgcgtcggcgtcgtaaagttgttttttttttttcgtttgggtttttgtcgggtgttagaaatcgggggtggggcgtttcgaggttgtcgtgtggtttttttttattagtgcgttatcgtcgcgtttttcgtagttttagaggagatgtcgttttttattttgattagggttcggtttttacgcggggtggcgcggttttggggttagagtcgggtttagtttttattgcgcgttttttatttttttcgagaattttttttttttcgcgtcgtttttatcgtttttacgtcggttgtagggggcgttgcgttttttcgacgtttttgtttttttttttgcgaggcgcgttggttaagtagttagttaataaatgttttagggtgtagattgtttagttcggcgttggcgtcgaggtagttaggttatgtttttaggaaatgtttaggttatatttttcgtttttcgtttttcgttttttaaatttaggtttgggtttggggggcgagaggcgggaaatggggaataaaagtcggtagtgtttgtttttgaaggttatttcgagagaggttttttattgttgttttggttattaggtttttatattttattttttgcggttatttttttgttttttttttgggtgatttcgtagtttttttatagggttaaaattaatggtattttttttttttttagtgagtacggttttttttagagttaggggttattttggtggttaaagatttttatatggtttagaggggtttttaatttatttttatgataattgagttgttttttttttttttagtttttttcgtaaatttgttttgtgttcggagttgggtggttgtgtagttttttagtttggagtaagttattgttattatgttgttggggttgagggttgaaggaagagagttttggaggtatagggtttgtgaatattttatgcgtagggtttgtttgttttatttttgtttagtagtttttttaggatttaggtcgtaggtttagttgaaggtttttaaaggggtgggtgggagttttttatgtttattttagttggttttgtttagagtgtttattttaaatttggtggtgggtaggtttcgtggggattaagatataagttaggatgaggttcgtatagagatttttattaaataagagaatttaagttgtgtttagagttttttagttgtcgtttttcggtgtgtgggcggtgattatcgtttacggggggaggggttttttgtggagatgttattttttttgtgttttggtttgggggtaggtattcgggtattcgagagagggaagttttaggatagagaagttttttgttcggttttaaaggtttagggttttatttttatttgcgtttattgttttattatggtgggggagggggtgttgggtgtttttgttgggtatttggttaagtggtgaataagggagatttcgtttttgtatatttttaggagtttttagttcgggggtggatagaggatttagataagttatatagaagttggtatagggggtcgttagagcgtggacgggtatgggttagttagattttacgatgtttatgagagtatttaggttaggaaggtggtcgtatttgtttttaggaaggagggggatataggaggtatcggagagggggttttttttttgtaggaattttagtagtttttgagttagaaatgttaggtagttggattttggtttgagtttttagaaggtagtagtgggaattttcgttttttatatatattttataaaatatatttgttttttgttgtattttgttggggtgaggggttgagattagtggcggttagggttttagttttaatttttattagattaggttatttggttttttttagtaagggatttcgttattgttttggggtttattggattatagtattttttagttttttagagttattcgttttttagtttggagggtttttattttgagcgttgggcggtgtttagtttgtatgtagagggtaagggtgtagttgtttagtttggttaggggttttgggtttatagggtagttttggggattaggttgaggacgggttgttaggggtttggatagagtcggcgaggttttagagtaagttgtgttttcgttgggttttgtagtgttaaatatagtagacggggaggggagttttcggttataattttttttttagtgtcgggaaattaatgttagttttattaggttcggtagtattgtttgttgatttattttatcgggttgcggagtaaagtgaggggttggattatatttaggttcgggtgttttgttatttgtttttttagtgttttaggggttagatttatttggtgtttgcgagaggtttttttgaggtagtgggaggtttttgttggttaattcggagggtttatcgtattttcgtggtgttattaggtaggttgttggtaagggtagtatagtaaggttgttgtgggttaggtagagtttttgttttgtgaatgttttgttggggttttatttgggtagagtgaagttgaggttggttaagattcgtatattttatatttggtagtttttttttggtatatattttatatttgatagttttttttcggtagttttgtcgttggttttgttgatgtttatagggttttatttgggttatagttagtatttgtatataggtggtattgtttttgtgggtttttgaggtatagtttttttaggatagtttttaatgttaggttgtttagtattgtgttggatgataatagggggttagtttttatttttttgtttagggttttattttgtagggtattgaggttttttttattttattgtttttttttttattttttttttgggagttatagtttggatttaatgatgtttaggagcggatcgattttgtcgtagattgatggtttagtagtgttttcgaatgtttataattagtgttaatatatttatttatttgtagaatttttattgtgtatttgtggtttaggaagtagattaggcgagttgggtttttttttgttttataagtattttgggtatttggggagtagttttgagttgtacgtattttttatagttttatttttaggataggttagaaggtaaggttagggtatataggttagagatgtttaggggttagtagagtttggtgttgggcggtttaggttgaggtcgtgtttcgggattaggatcgggttggtattaggaatttggtttatgttaagattattggttttgtgtttttattttgtgtcgttatttgttttttttggagtaagtttgtagatatttttgtatattttataggtcgaggaaggttttttggaaaatttttaaggttgggggtgtacggattagttattggggttttcgatatagggtagttttggtttcgggtttttgtggagtggttttagtttagttttagttagggtggggattttttatttgttttaggagtagggaatatattttttttgtagcgtgtagtttgtagtgttgtttattttattttaatttttgaggattggtttagttattattttcgtgagtatagtttatgttgtagtttcgtgattagtaggtttatttttaggtttgttatgttattttttatgagtttcggattttattttttttagttttaagaggaggtatagtttggttttgtttatggtatttttaggtttgtttttagttttatagtaattatttgtatggtttgttattagttattttttttataggagagttcgtcgtgtttcgagggttattttaggttagggttattgtttttcgttttttttttagttttttttaaggttttggttatagagtttagaattagtaggtagaagttggagttatgtaagtttttattggggttcgcggggtgtggggtgagtggttaagattggtttttgtttagaattttggagttttattggagatttaggttgggggttatttggttgaggaattatgagatattaaagatgacgtcgagggttttggggatgttcgggtcgtttgtaaaggtttgggcgttttttaggggtaggtgtattattttaatgagtttatttttttttattaggtttttatttggatcgttacgttgggtatttgttatttttgtgtagaatatggtttgtttggagttagttagttttattttagatttacgggttgagatagggtttgttgagttatttacgttggtttcgttggttttttggtttttttattattttttaatttattttttttattttgttttttttagttttttagtaggtaggattttgggatgtttttttttattcggatttttatttggtgtgtacgttcgtggtttttttcgtagtagggtattttttttttgattacgttg

SEQ ID NO: 99 - DNA, 5954 bp, Artificial Sequence
  chemically treated genomic DNA (Homo sapiens)
gtttttattaataggatgtaaaggaagtgattttatatgatttttaaggttaggttataaaatgttatgtatttttaagtgagtttttgttttttaaaatcggtagttaaattatgaagaagtttaagtaatttgtggagtagttttatggagaggattaaaggtttttatagttttggttgattttttagttggtagtaagtgttaatttgttaggtgtgtgagtatattattttgaaaatggatttttaatttttaattgaattatttgatattgcgtagagtagagataagtcgttgttgttgagtttattttaaattgtagatttatgggtaaaataaatgagtgggatggtttgttatataatagtaggaaatagatattcgtatttattttttttatttttttttattagagatgtgtaaaagttttggggttttaatttaggtttagatattaatagggaattggtttttatgtttttgtttataagttttttgaagttttttgtttagttgtttattttttatttttggggtgggggaattttttgagagtttggtaattttatagttatatttttttgaggttttgttatattatcgttttttttatttttaagttggttatggatatttttttttaaggttttttagggtggttttttttatttttttttttatttttagaatttttggttttatttttagaatggattagaggtagagttttattagaagtgtttgcgttttttgtttggtaaaatgtttaaggtgagttatgataaagtttgttttttgttggaagagaggggatagggataatgttgagggagttaatttaatgtgatattttagtgaatgattttgttatggtttgaatgtattggaaattgaatttttaaatttatatgttgatggtatttgggggtagggtttttgggaggattagataaggttattaggatggggtttttatatgaggattggtagttttataataggatgaagagagatttgcggtggtatgtttttgtttttttattatgtgatgagttagtaagaaggtttttattagatgtagttttttaattttggaatttttaggttgtagaattatataaaataaaatttttttatcgattatttagtttatggtattgtgttatagtaatagaaaatggattaagttagatttagatgtatatttatttaataattgttttttaagtttttaggtatgtgttagaagttggggagataaggttaaatggtaatgttattatagatttggataagagggtatttgtggttatttagagtttatatttgattttgattatgttttgggtgtttaaaaatttagattgtttatttagtttaagttagtttttttgttttgttttgttttgttttgttttgttttgttttgttttttgagatagggttttgttttgttgtttagttggagtgtagtggtgtaattttagtttatcgtaattttcgtttttttggtttaagcgatttttttattttagtttttcgagtagttgggattataggtatacgttattatatttagttaatttttgtagtttttgtagagatagggttttattttgttgtttaggttggttttgagtttttgagttttttaatttttttgttttagttttttaaagggttgggattttaggtgtgagttattgtgtttagttttttagttagttttaaggtttataaagttgtttgtttaggtttatttttttgagggtatattttgtttttggaatgtgtatttatagagaggtgacgaagaggtggttgtaggtaaggcgtgtgggtaaagtttgggtgtgtgggttggagtatttatatgtttgagttttaggttatttgtgatataagatagagatggagtgtgaagagaagtggagtgggtgggttgagggttagggttaggttattttttcgtattgttatgtttttgtataaaattttaaagagtttaagaatgttaaatttgaatatggtttttttggttattagaaagaatatttgttaaggtaggagaatatatattttattttatagttagttaaatgtttagatataaggtatttggtttttgatttgtatttttaatttgggttttttatgttcgggtaggttagtataataggattagtgtttaggttttgtatttttatagggagatatttttttgtgggatttagataatgatagggagtatggtagagattttagaagttgtttgaagattgtttttaatgttattatagttgtttttatttttaattaggagtggtagggtagtaagggatagtagatgggattaatatgagagaatgtttttatggggggaggggatagtgaggggatttagttgttttgttaatggttagtttttatttgtttgttggagttttattaattttagtagggatggtattaggtttaagaggttgaaggagagattagagttagtaattgggatatggggttttattgggaaatttatatatagggacggtcggtggtagtgggttggataggagaattgtatagttttatggtaggttgggtaggagagttataatcgtttataaaaagtatgtagtttatatattatttttatttagtattttttttttaataatttttatttgataatttttatttggttttaaataaagagttttgaatttttgtatattttgtattttataggatgggtcggggtttaaatgttttttatagataaggaatgaatttttaggttggttattttcggattttttagtttaaaattttaaatatatattggggtgtatttgttatataggattatttttagggtatgtttaagttaagttattgttgttaggagtatttgttatatattattataaatatttttagttcggagggagcggggtgtggagtagggtggaataggaggaattttatgtttattttgtatgggttgggtagggtagggatttgaaatttagtttaagatagaatggtatagtggtttttaaagtgtggttttcggattagtatttatattatttaggagtttgttaggattttaattatttgtaggatagagggtgtttttttgcgggtatgatatattgttgggtttaaaggattttttagttttatttttttgatttggtgtgggaatgttatgaaggagattttttgttgaaaagagaatattttttgagtatgtacggtatttaagcggtgggttaaatattttatgaatgttgttatatgtaatttttaatagttattattaagatcggtatgattgttatggtttattttattattattttttgtttaagggtttattttagaggttaagtattttgttttgttttgggtttaaaacgtaattaggaagttatttaggtttgtgtgatttttagattattttgatttttttatagtttgtttaatagtggtttatgtttgaatgtgatttagaattatttggaggttttattaaaattaattgttttatagttttttatttagtaagttgggatggggttttaaaatacgtatttttaataagtttttagatgatgttgtttttggtttaaggattacgttgtgagaattatagtgttgggttgggatttagttttcgtttttattttattcgtataaagcgtttataattatatttttttataacggtgtgttgtgagaggatattgtgataatggaagtgaaagagttttgttagttgtataggtgaatgtttttggttattaattaggtaatttgtttgaggttagttttttggagtttgggagggtagagggttgggacgtagggtgggtatcgtagttatttagagagtttttgtagtttattttaattttgggttattttttttttagggagaaagttagttttgagggtttaggtttatagttttttttgttattatttttattaatttatatttttttttttattttaggtagttgttgggtattgttttagtattggttgttttgggttatttttttaggggttagtttaggtaagttggggtagtttaagtttgtgatttaggatttgaggttggatttcgtttacgttcgtttttatgagatttagagttttcgattttttttttttgagttttaaattgcgtattagtaaaataggcgtaacgagagtatttatgagttgtgggaatttaagggttagaattgtatttagcgtttggtatagagtttggtttttggtaaggatttaattaatggtagttagtatttttaaaaagtttttgggtttaggtcgttttttgatagaggtttcgatttaggatataaatcgtttttacgtcgtttttcggcggtattcggatatattcgttttggaatgttagcgtgggggttttagggttattcgttcgagatgagaggggtagggtagggtaggattaggaaggcgttgagtttaggttggtgcggggaggggcgtggttttattttattagggtcgggggatggggtgggttcgaaggagaaagtgaaggaggcgggggcgttgggagggttcgggaggagatcgggaggacgaggtaggcgggagttgggcgggatcgttaggtagcgtcgtgagtggatagggttggagcggggcgggtttaatttttagtgtaatttgggggcggggttgtcgggatagaggagagatttcgtagcggggcggggttttagttttagttgggttcgggggcgaggttggttggggtacggttatagtgggcggggtttggtcggcgggagcgtatcgtttttttaaagggttcgggggcggggtcggcggagggggcgtgttttttgggggcggggtttgtcgagttcgcggcgtttttcggttgtagtcgggagggggtcgaggagtgattgagtttcgggttgtgtagttcgacgtcgattgaggtacgagcgggtgacgttgggtttgtagcgcggagtagaaagtagaattcgtaggtgagtaagggggtagcgggtcggggtagtttgtcggataattataggtaaagttagttttagttttcgtttttgcggttcggttcggataatttttttcggaattagtgataggtcggggtagttggtgggtgaaaaggagttttagttattagttttgaatttttagtttttatattcggtcgtgtatagttgcgtgattttgggttcgtttttttatttggttttggatttttcgggttttagtaggaggaagtgaattaggtgaattttacgttttcgttgtttttttttatttaaaacgtcggaaggtgagagttggtaggtgagagtaggttgtaggtcgttataggtgtttttatcgcgttgttttttgtagtttttttttttgtaaaatgggattgagagaagcgaattgttttaaagagtgtattgttttttcggttggggttcgaatttattaattttggggaagaggaggttaaagtagggaggttttatttttcgttttatttgttttttattaattttaatagtttaattgagtcggattttttaagattttaagttggaaatttagtggggtttttttaggtgagttggtttgagtaggaggttggaaattggggaatagtttttatattggtgagtggggaagagaagggaaaattttattaatttttgggtttagggttaagtttagggttttaggggtttttgaagtatattcggggttaattttttggttgacgggttttgtttttggaggtggtgggtgttttgtgttgggtcggtgggtaggtgatgggtttgttttttatggggaatgagttttttttttttttggagagatgggtttggttatagttttttttgattttgtgaaagttagaaattgtt

SEQ ID NO: 100 - DNA, 5954 bp, Artificial Sequence
  chemically treated genomic DNA (Homo sapiens)
ggtaatttttggtttttataaggttaggaggggttgtagttaaatttatttttttaagaaaaaaaaaggtttattttttataggaagtaagtttattatttgtttatcggtttagtatagagtatttattatttttaggaatagaattcgttagttaagaaattaatttcgggtatgttttaagggtttttggggttttgggtttgattttgggtttaaggattggtggggttttttttttttttttttatttattagtgtaagaattgttttttagtttttaattttttgtttaggttagtttatttggaaaagttttattgagtttttaatttgaagttttagggggttcggtttagttgaattgttagaattggtgggaagtaggtgaggcgggaaatggaatttttttgttttggtttttttttttttagggttggtgggttcgagttttaatcgaggaaatagtgtattttttaaagtaattcgttttttttagttttattttgtagggagagaaattgtagagggtaacgcgatgggaatatttgtggcgatttgtagtttgtttttatttgttagtttttatttttcggcgttttaagtgagaaagggtaacgggagcgtggaatttatttggtttatttttttttgttggaattcgggaggtttagagttaggtagagggacggatttaggattacgtagttgtgtacggtcgagtgtgagaattgggggtttaggattggtggttaaagtttttttttatttattagttgtttcgatttgttattagtttcgaggaaagttgttcgagtcggatcgtagaagcgggggttaaaattaattttgtttatggttgttcggtaggttatttcggttcgttgtttttttgtttatttgcgggttttgttttttgtttcgcgttgtaggtttagcgttattcgttcgtgttttagtcggcgtcggattgtatagttcggggtttagttatttttcggttttttttcggttgtagtcggggaacgtcgcggattcggtaggtttcgtttttagaagatacgtttttttcgtcggtttcgttttcgagttttttgggaaggcggtgcgttttcgtcggttaggtttcgtttattatggtcgtattttaattagtttcgttttcgggtttagttggagttgaggtttcgtttcgttacggagttttttttttatttcggtagtttcgtttttaggttatattggggattaagttcgtttcgttttagttttgtttatttacggcgttgtttaacggtttcgtttagttttcgtttatttcgttttttcggttttttttcgggtttttttagcgttttcgttttttttattttttttttcgagtttattttatttttcggttttagtagggtgaggttacgttttttttcgtattagtttgggtttagcgtttttttaattttgttttgttttgttttttttatttcgggcgggtagttttggggtttttacgttggtattttagggcgggtgtattcgggtgtcgtcggggaacggcgtgggagcggtttgtgttttaagtcggggtttttattaggaggcggtttgggtttaggaattttttgaaaatattgattattattgattgaatttttgttaggggttaggttttatgttaagcgttgaatatagttttagtttttgaatttttataatttatgggtattttcgttgcgtttattttattaatgcgtagtttaaggtttagagaagggaagtcgagggttttgaattttatggaggcgggcgtgagcgggatttagttttaggttttgagttataggtttgagttgttttagtttgtttggattggtttttggggaagtagtttagaataattagtgttggggtagtgtttagtagttgtttgaggtgagggaggaggtgtgggttgatgagaatagtggtaggaggggttgtgggtttaagtttttaaagttggttttttttttgaagaaaaagtggtttaaaattgaggtgggttgtaagagttttttaggtggttgcggtgtttattttgcgttttagttttttgtttttttaggttttagaggattagttttaggtagattatttggttaatgattaggggtatttatttgtgtagttgataaagtttttttatttttattattataatgtttttttataatatatcgttgtgggagggtatgattatgagcgttttgtacgagtggagtaagggcgggagttggattttagtttagtattgtagtttttatagcgtggtttttgaattaggagtaatattatttgggaatttgttaggagtgcgtattttgaagttttattttaatttattgaatggaaaattgtgggataattggttttaataaggtttttaggtgattttgaattatatttaagtatgaattattgttgagtaaattgtaaagaagttagggtggtttgagaattatatagatttaggtagttttttggttgcgttttaaatttaggataaggtaagatatttaatttttgggatgagtttttaaatagggaataataataaaatgagttataataattatatcgattttgatggtagttgttgaagattatatgtgatagtatttataaagtatttggtttatcgtttgaatgtcgtatatgtttagaaaatgttttttttttagtaaaaagttttttttatagtatttttatattaagttagaaaagtgaggttggagaattttttaaatttagtagtgtgttatattcgtagagagatattttttattttgtaagtggttaagattttaataagtttttagatgatgtggatgttggttcggggattatattttgagaattattgtgttattttgttttgggttgggttttagatttttattttatttagtttatgtaaaatgggtataaaattttttttattttattttattttatatttcgtttttttcgagttgggggtgtttgtgatggtgtatggtagatgtttttgatagtaataatttgatttaagtatattttgagaatggttttgtatggtagatgtattttaatgtgtgtttggagttttgagttaaggaattcgggaatgattaatttggagatttattttttatttgtgaggaatatttgaatttcggtttattttgtggaatgtagggtgtataggggtttaaagttttttgtttggggttaaatgaaggttattaggtgggggttgttagggggagggtgttaagtgagagtgatgtataaattgtatgttttttgtaagcggttgtggtttttttgtttagtttgttatgggattgtatagtttttttgtttagtttattgttatcggtcgtttttgtgtgtaagttttttaataaaattttatgttttagttgttggttttggttttttttttagttttttgaatttagtattatttttattgaagttaatagggttttagtagatagatgggaattggttattggtaaaatagttggatttttttattgttttttttttttatgaagatatttttttatattagttttatttgttattttttgttgttttgttatttttgattagagatagaggtagttgtggtgatattgagagtagtttttaggtagtttttagaatttttgttatattttttgttattgtttgagttttatagaagagtgtttttttgtaggagtgtagggtttgggtattggttttgttatgttgatttgttcgaatatggagagtttaagttaagagtgtaaattaaggattagatattttgtatttaaatatttaattgattgtgaaataaaatgtgtatttttttgttttgataaatgttttttttaatgattaggaagattatgtttaaatttagtatttttggattttttagaattttatgtaagaatatggtagtgcgggaggatagtttggttttagtttttagtttatttattttatttttttttatattttatttttgttttgtgttataagtggtttaggatttaggtatgtggatattttagtttatatatttaaattttgtttatacgttttgtttatagttattttttcgttatttttttatgaatgtatattttagggataggatgtatttttaggaggatggatttgggtaggtagttttgtaaattttaaaattggttggggggttgagtatagtggtttatatttgaaattttagttttttgggaggttgaggtaggaggattaaagagtttaggggtttaagattagtttgggtaataggatgaaattttgtttttataaaaattataaaaattagttgggtgtggtggcgtgtgtttgtggttttagttattcgggaggttgaggtgggaggatcgtttgagttagggaggcggaggttgcggtaagttgagattgtattattgtattttagttgggtaatagagtaagattttgttttaaaaaataaaataaaataaaataaaataaaataaaataaaataaaaaaattggtttgggttggataggtagtttaggtttttaaatatttaaagtatgattaaggttaggtgtgggttttgggtggttataggtgtttttttgtttaggtttatggtgatattgttatttggttttgtttttttagtttttagtatatgtttggaagtttaagggatagttgttgagtagatgtgtatttgagtttaatttagtttattttttgttgttataatataatattataggttgggtaatcgataaaagaattttattttgtatagttttgtagtttgggaattttaaggttgagaggttatatttggtgaaagtttttttattgatttattatatggtgagagggtaagggtatgttatcgtaggtttttttttattttattataaagttattagtttttatatgagggttttattttgatgattttatttaatttttttaaaggttttatttttaaatattattaatatatgaatttggggatttagtttttaatatatttaaattatagtagagttatttattgaaatattatattgggttggtttttttagtattgtttttatttttttttttttagtagaaggtaagttttgttatgatttattttgggtattttgttaggtagaaagcgtagatatttttagtgagattttatttttagtttattttagaggtggagttaggagttttggaggtgggaaaaggggtgagaagaattattttagaaagttttgagagaagatatttatggttaatttggagatggggaagacggtggtgtggtaagattttagagaggtatggttataggattgttaggtttttagaagatttttttattttaaaggtggaagatgaatagttgagtaggagattttaaagaatttgtaggtaagaatatgggggttagttttttgttagtgtttgggtttaggttaaggttttaagatttttgtatatttttggtggaggaaggtaaagagaatgagtgcgggtatttgttttttattgttatgtaataaattattttatttatttattttgtttataaatttgtagtttggggtgggtttagtagtaacggtttatttttgttttacgtaatgttaggtggtttaattggaggttggggatttatttttaagatggtgtatttatatatttagtaagttggtatttgttgttagttgggaggttagttagagttgtggaggtttttggttttttttatgaggttgttttataggttgtttgagtttttttataatttggttgtcggttttgaagaataaagatttatttagaagtgtatggtattttgtgatttagttttagaagttatataggattattttttttgtattttattagtagaagt

SEQ ID NO: 101 - DNA, 4942 bp, Artificial Sequence
  chemically treated genomic DNA (Homo sapiens)
gttgtttagagtttaaaggggttaggcgtggtggtttatgtttgtaattttagtattttggatgggaggattatttgaggttaggagtttaagattagtttgggtaatatggagaaatttcggttttattaaaaatagaaaaattaggttaggcgcggtggtttacgtttgtaattttagtattttgggaggtcgaggcgggtgtggattataaggttaggagtttaagattagtttggtttaaatggtgaaattttgtttttattaaatatataaaaattcgtcgggtgtggtggcgggcgtttgtagttttagttatttaggaggttgaggtaggagtattgtttgaatttgggaggtggaggttgtggtgagtcgatattgtgttattgtattttagtttgggtgatagagtaagatttcgttttaaaaaaaaaaaaagaaaagaaaaattagttaggcgtggttgtagtgagttgaggtaatattattgtattttagtatgggtaatagagcgagattttattttaaaaaaaaaaaaaaaagagattagtttggttaatatagcgagattttatttttattttttataaattaaaattgtttattgaaaaaaaaaaaagtgtcgaaaggaagaggaaattgagagttttgatgaggtttttagatattttggttagtgttaaattttaaggggtagaaaagattaaaagagtttaaattgttttggagatatagtttttatatatttatagttttaatttttaagaattataatattttgtttttatgaaaagattttatatatatatatattatggaagatttagagattagaaaagtataaagaggaaaataaaatttatttatagtttagaaagtaggtagtaaaaatagtatgtataatatgttttttttttagatttgttaatgtatatatagtagtaattttatttttttttttatgtttttttgttttttagatattttgtatttagtatgtgttgtttttgtagttaaaaagtgtgaagatgtataattttattgattagaaattattattaattaatattattattttgatgtatttttaggggtttttttttattttttttttttggaaatatagttttgttttgttgtttagattggagtgtagtggtacgatatgggtttattgtaatttttattttagttttttaaagtgttaggattataggcgtgaattattgtgtttagttatatatatatatatattttttaggataattttgttttgtttgttttttttatttaaatataagaatatgtttatgatatatttttaaaatataatttttaataatgtatttttaaaaaaagaaagaaagaaagaaagaaaattgtatagagatagggttttgtttttattttagttgttttaaaaatttatttgtttttattggtattattatgattgatgttgagatagaggtagtttagtaaattgttggagagtaggggaaagttagtttgagtgaaataaattatggataatttgtagtgtaggtaatttaggtaaggataattttaggatttttatagatgttattttatttaatttttattgattttttagcggcggtggggggatatagttttattgtcgtttaggttggagtgtagtggcgtaatttcggtttattgtaatttttgatttttgggtttaagtgatttttttgttttagttttttaagtagttaggattataggtttttattattatattcggttaatttttgtatttttagtatagatagggttttattatgttggttaggttggttttaaatttttgggtttaagagattttttagttttagttttttaaagtattgtaatgataggcgtgagttattacgtatggttaatttttattgatttttttttttttgaaatggagttttgttttggtatttaggttgaatgtagtgttgttttgttttgttttgttttgagatggagttttgttgttatttaggttggagtatagtgggttttttttgagatggagttttgttttgttatttaggttggagtgcggtggtgtaattttagtttattattatttttgttttacgggtttaggtaatttttttgttttagtttattgagtagttgggattgattgtaggtgtttattattacgttcggttaattttgtattttagtagagatagggttttattgtgttggttaagttggtttttaatttcggattttagttgatttgtttattttagttttttaaagtgttgggattaaaggcgtgatttattacgttttggtttaatttttattgatttataataaagttatatatatagggtagtttttttatagttaatagatgaagtaaaaggttggggttagttgttaagttatgggaaatttattagttatagtatggtgtgaggaatggtgtttttatatttttagttttaaaattgtaaagatatttttagtagagaaagattattttttttttttttaataaagagttggttaattttttttaattttttgtgaaattttttaataaagttagatttttttttaggtttttttagtgtggttattgtagggtaattattttataagtttaagttatatggtaaaaagttttatgaattagttatatttaattatttttatattattattgtgaaaatgaaataatttaagaaattttttgttattatttattttttttttttttgagagttttaattgtcgtttaggttgaagtgtagtggtgaagttttggtttattgtaatttttgtttttcgggtttaagagattttgttttagttttttgaggagttgagattataggcgtgcgttattacgttcggttaggttttttttttttttttgtatttttagtaaagatagggttttattatgttggttagattggttttgaatttttgattttaagtgattcgttcgtttcggttttttaaagtgttgggattataggtatgagttatcgcgttcggttttattattatattttttttttattattttaaaaatttttattttttttaaaagagataggatttcgttaagttgtttaggttagttttgaatttttgggtttaagcgatttttttaaagttttgggattgtaggtttgagttatatattgtatgtatatttttttttttttttttgagatggagtttcgttttgtcgttaggttggattgtagtggcgcgatatcggtttattgtaatttttgcgtttagggtttaagcgatttttttgttttagttttaggaatagtttggattttaggtacgcgttattatatcgggttaattttttatattttagtagagacggggttttattatgttggttaggatggtttcgattttttgattcgttattcgtttttttcggttttttaaagtgttgggattataggcgcgagttatagcgttcggtttacgttttttttatatgtattttgttaagaaaaggtatttatgagtttttttcggggttgagaattgaaataggttaagaattataattttttatttttgtatatatattttttttggttcgaggttgggtttttatagggtatttttggagggtgaaatatttttattttgttaagtatttggtagttatggatggggggtttaagaggaggaattttttagtttatttttaagtaagttagatttattatagtataggttttaagttttatataagtaggtttaggggattttttggagaggaagttgtttgtagggataagggtcgttaggagagtttgagtttattaagttattaattagttgtgtgattttggataagttttagattttttttgggtttttgaatttattttttattaagttattaattagttgtgtgattttggataagttttatattttttttgggttttagtttttatatttatatattggtagtggagttatatggttttacggattttttttagtcgaaagtagggtattaagtcgatttagttattaaagtagttttttgtgggcgcggcgtaggattttaatagttttttttttttcgtttaggttcgcgaaaatttcgcgtaatacgtttttcggagcgacggcgtttatttaatcgtagttttagcgttcgaatttagtttcgttttttttcgggggcgttttatcgtgtttcgcgtcgggtttttagggttgtcgggtatttttcgttttttcgcgtttcgatttcgaatttttttttttagttttttcgggtattttattttataatgggcgcgagacggtttttcgacgatgagcgtttggttagttagggatttcgcgtggttaggataacggttaatcgtcgtggagcgcggcgttttcgcggagaggttcggttcgaatattttttcgtttttttttttttttcgttttttttttgcgcgtcgttttttatttatagtttttttttttttttttttttttcgtttttcgagtattagcgcgttttgagttgtttttagggtttttttttcgtcgttagtagtttatttggagggaggaagtaagggaagaggagaggaaggggagtcggatcgattatttagatagagtcggtgaatgggtttgtggtgattttcgttttttattttattttttttttttattcgatttttaatttttatttttagttcgagtcgtcgttcgaaaggtcgggtcgtcgttttaggaggagtcgtcgtcgtcgttattttcgttatggagttgattattattttcgagaagatcgtgtttttcggtaggacgtaggagtcgggggtagggttgaggtgattggggtgggggaggggaggttcggtttttttgatttcgtttcgttttttatttttttttttttaga

SEQ ID NO: 102 - DNA, 4942 bp, Artificial Sequence
  chemically treated genomic DNA (Homo sapiens)
tttagggggaggaaagtgggagacggagcggggttagaggggtcgggtttttttttttttattttaattattttagttttattttcggtttttgcgttttatcgggagatacggttttttcgagaatggtgattagttttatggcggaggtggcggcggcggcgattttttttaagacgacggttcggtttttcgggcggcggttcgaattggggatgggggttgggggtcgggtgggaagggagggtggggtggggggcgggggttattataaatttatttatcggttttgtttgggtagtcggttcggttttttttttttttttttttttttattttttttttttaaatgggttgttggcggcgggggagggattttgggggtagtttagagcgcgttggtgttcgggaggcggagggagaaagaaggaagggaggttgtgagtgagaggcggcgcgtagggagggagcgagggagggaggaaggcggagggatattcggatcggattttttcgcggaggcgtcgcgttttacgacgattggtcgttgttttggttacgcggaatttttaattggttaggcgtttatcgtcgaagggtcgtttcgcgtttattataggatagggtgttcgggagaattaaggagaggagttcggggtcggggcgcgggaaggcgggaggtgttcggtaattttaggagttcggcgcggggtacgatgggacgttttcgggaagaggcggagttgggttcgagcgttggggttgcggttgggtaagcgtcgtcgtttcgaggggcgtgttgcgcgaggttttcgcgggtttgagcgggggaggggggattgttgaagttttgcgtcgcgtttataggaagttgttttaatggttaggtcggtttggtattttgttttcggttgggagggattcgtaaggttatgtggttttattgttaatgtgtagatgtggaaattgaagtttagagagggtatggaatttgtttaaggttatatagttggttaatggtttggtaaggaatgggtttaggagtttagagagggtttggaatttgtttaaggttatatagttggttagtggtttgataagtttaagtttttttgacggtttttgtttttataagtagttttttttttaaggagttttttaagtttgtttatatggggtttgagatttgtgttgtgataaatttgatttgtttaggggtgagttaagggatttttttttttagattttttatttatagttattaggtatttgataggatggaaatgttttattttttaaaagtattttgtaaaggtttaatttcgaattagaaagaatgtgtgtataggaataaaggattgtggtttttaatttgttttagtttttaatttcggaagaaatttatgaatgtttttttttagtaaaatgtatataaagaaaacgtgggtcgggcgttgtggttcgcgtttgtaattttagtattttgggaggtcgaggggggcggatgacgagttaagagatcgagattattttggttaatatggtgaaatttcgtttttattaaaatataaaaaattagttcggtgtggtggcgcgtatttgaagtttaagttatttttgaggttgaggtaggagaatcgtttgaattttggacgtagaggttgtagtgagtcgatatcgcgttattgtagtttagtttggcgatagagcgagattttattttaaagaaaagaaaaaaaatgtgtatatagtatgtggtttaggtttgtaattttaggattttgggaggatcgtttgagtttaggggtttaagattaatttggataatttagcgagattttgttttttttaaaaaaaatgaagatttttaaaatgataaaggaaaagtgtaataatagggtcgggcgcggtggtttatgtttgtaattttagtattttgggaggtcgaggcgggcggattatttgaggttaggagtttaagattagtttggttaatatggtgaaattttgtttttattaaaaatataaaaaaaaaaaaaaaatttagtcgagcgtggtggcgtacgtttataattttagttttttaggaggttgagatagaattttttgaattcgggaggtagaggttgtagtgagttaagattttattattgtattttagtttgggcgatagttaagatttttaaaaaaagaaaaaataaatggtaataaagaattttttgaattgttttatttttatagtaatgatgtaggggtaattggatgtagttggtttatagagttttttattatatgatttgagtttgtgaggtaattgttttgtagtagttatattgggaaaatttaggaggaagtttgattttgttgaaaggttttataaagaattaggaaagattggttaattttttgttaaaagaggaagaaatggtttttttttgttagagatatttttgtagttttgaagttagaaatgtagggatattattttttatattatattgtgattagtggattttttatggtttagtagttaattttagttttttgttttatttattaattgtggaagaattgttttgtgtgtgtaattttgttataaattagtgaagattgggttagggcgtggtgggttacgtttttaattttagtattttgggaggttgaggtgggtagattaattgaggttcggagttagagattagtttggttaatatagtgaaattttgtttttattgaaatataaaattagtcgggcgtggtggtgggtatttgtaattaattttagttatttagtaggttgaggtaggagaattgtttgaattcgtgaggtagaggtggtagtgagttaagattgtattatcgtattttagtttgggtgatagagtaagattttattttaaaaaaaatttattgtattttagtttggatgatagtaagattttattttaaaataaaataaaataaaataatattgtatttagtttgggtgttagagtaagattttattttaaaaaaaaagaaattaatgaagattggttatgcgtggtggtttacgtttgttattgtagtattttgggaggttgaggttggaggattttttgagtttaggagtttgaggttagtttgattaatatggtgaaattttgtttgtattaaaaatataaaaattagtcgggtgtggtggtgggagtttgtaattttagttatttgggaggttgaggtaggagaattatttgaatttagaagttagaggttgtagtgagtcgagattgcgttattgtattttagtttgggcgatagtgagattgtgtttttttatcgtcgttaaaaagttaatgaagattaagtgagatgatatttgtgaaaattttggaattgtttttatttgagttatttatattataaattatttataatttgttttatttaagttaatttttttttgttttttagtagtttgttgggttatttttgttttaatattagttatgatgatattagtgagggtaaatggatttttaaagtaattgaaataagagtaaaattttgtttttatataattttttttttttttttttttttttttttgaaaatgtattattgaaagttatattttaagaatatattataaatatgtttttatatttaagtgaagaaagtagataaagtagaattattttaaaaaatatatatatatatatggttgggtatagtggtttacgtttgtaattttagtattttggaaggttgaggtggaggttgtagtgagtttatatcgtattattgtattttagtttggataatagagtaagattgtgtttttaaaaaaagggggtgggggagaatttttggaaatatattaaaatggtagtattaattaatgatggtttttgattagtgggattatgtatttttatattttttaattgtaaaagtagtatatattgaatgtagaatatttgaaagatagagaagtataaagaaaaaaataaaattattattatatgtatattaataaatttggaaagagagtatgttatatatgttgtttttgttatttgttttttaaattataggtaagttttatttttttttttatatttttttagtttttaaattttttatagtatatatgtatataaaatttttttatagaaataaaatgttgtaatttttaaaaattagaattataaatgtataagagttatgtttttaagataatttagatttttttgattttttttattttttaagatttaatattgattagagtgtttggagattttattaaagtttttagttttttttttttttcgatattttttttttttttaataaataattttaatttataaaaagtagagatggggtttcgttgtgttgattaggttggttttttttttttttttttttgagatggagtttcgttttgttgtttatgttggagtgtaatggtgttattttagtttattataattacgtttagttaattttttttttttttttttttttttgagacggagttttattttgttatttaggttggagtgtaatggtataatatcggtttattataatttttattttttaggtttaagtaatgtttttgttttagttttttgagtagttgggattataggcgttcgttattatattcggcgaatttttgtatatttagtagagatagggttttattatttgggttaggttggttttgaatttttgattttgtgatttatattcgtttcggttttttaaagtgttgggattgtaggcgtgagttatcgcgtttggtttaatttttttatttttagtagagtcggagtttttttatgttgtttaggttggttttgaatttttggttttaagtgatttttttatttaaagtgttgggattataggtatgaattattacgtttggtttttttggattttaagtagt

SEQ ID NO: 103 - DNA, 5689 bp, Artificial Sequence
  chemically treated genomic DNA (Homo sapiens)
ttttagggaatttgcggagtgtcgttttgggaaattaacgcggtcggggtttgggggttgggagttttattttgtgtgtgtatgtgtatggcgggggggggggggggcgcggtggttgttgaggggtcgttatataggtttttcggaggttcgcggagtgaaacggggggagttaatgggattaacggcggtgggagaggggttgtgtgcgatttgttaaggtgcgttcgtgtggtttttcggcgggttgtgcggtggtatgtgattttattgagtaggtgtttttgtatgtttgaaatttagcgagtgtgtgggattgttcgtgttagttatatgtgtgtatgtggagacgtagatgttttggagttatgttgtcgttttgtgagtgttgagtggtttcgttgtgttttcgtgttgttttaagagtgtggattagaatggtttaacgttgggttatgtgttttttatcgcgtgggtgtttttttttaattgtgtttgtgtatggttgtcggtcggtgtcggtgtgtgtgtttgtgttgagtaaatgaggttagagggttgtttagtagaagatttagggtttaggttatatatttttttggaaaagggattatggaaggatagtgattagaaggatagaataggggaggagagggttcggttttttgaattttggtttttggtattttttttttttgtattagtttagatgggaaagttaggttagggttatatagatttttggtgttggggtttttagagagaagttgattagttttttgtttttttggtttaggacgtagggaagagttttttaggtagtggaaatgttatattgattttgtggtatagaaatgaagattttacggtggggtggaagggtattttttttggagtgagagtgaagagttttgagttatttttaaagggagaagggaattgagtgttttttagggtagtcgttttgtattaggttttttttttattttttattttgttttagaaaggattttttcgtttagggtgattttatataggagatttttatttatatggaattagatatatagcgtggtatattaatattagattagattatataaggatatttatcgtgttatattgtgtttgttaaggagtgggtggggagagtattggaatttgaattgggaggttagtgtagtgtttagaagggatttagatgtgttatattagtataggacgttaatttatgtttgttaggattttggggtgaaggagaggggttggttggtgggagggttttttagattggttttttttttttttttatttttattttattttagttatagattttgtttgttgttttttttttgttttttacgtttgttattttttttttttttgtttttttttttattttatttatatttttatcgtaaatggttatttttattatatttatgtatatattatgggaggtagggatagaggaaattatttgaattgttttggggcggggagggtagaaagtgggaggggtgttgggaatgtgttaaggtgtagtgtttggttaagtaggggtttgaggattagggagatatagatggagagaaataaagattttagaagttgaaggggaagttgggagggatgtttaggagagagagtttttaggaaaaggttttagaggtagataaaaggtagagttgggcgggtagtggcggggtaggtaagggaggcggagggatataggagggggcggggtattgaggttgtaagtagatggagaggatttgttttgttgagttgaattttttagttagtgaggtttgggagaatttgatgggggtggggattattattttggttgttcgtttttgtttttttattttttttttattttattttgggttttggggaaggaggtgtttggttttaatttttttatggttttaatgtaaggattttagggtttttattttgtttttaagttgtggttattttatttagtttatatatttttaagtttattatagagggagaattggggttgtagggatttaggggttgtaagttatttgtggtgagaaaggtgattttttttttttttgtaggatttgaaggagaagaaggagaaggtggaggagaaggtaagtcggaaagagcgaaagaaagaagtggtggaggtgtggaggggtgggggagaggattatatttgttttattatttttttttttaattattttattttttttttgtttttttttcgagggtgttgggttttgtcgtttttttgagttttgttatttttgttgttttattttgtggtttattttaagtttttttattatttaggttttagttttattggtggtgatggtgggtaaggtatgtagttagtttgaggttatttttttttttggtttttataggaggaggagaacggggttgaggaggaagaagaagaaattgtcgaggatggagaggaggaagatgaaggggaagaagaaggtggggaggggtaggggaggttgggttggtaaagttcgggtttaaaggagagtagagttagggtgggtttgaagatttgaagtagggttgagggcgattacgggggttttgtcggagttttttgtttttttttaatgatttatttttggttttttagatgaggaagaagaagaagaggatgatgaagggttcgcgttgaagagagttgtcgaagaggaggtttgggttgggttgttgggtttgaggggttgttagggatgtagtcgggttgggcgttttttggatttggatttagatttttgtgtggtaggggtgggggttggaataggatcgggatagggggaggtttttttttttattttatagtttttttattttttttttttttataggatgaagcggattttaaacggtagaagatagaaaatggggtatcggcgtgagtttttgttaataggttggggttgggaggtttttttgggtttggaggtgggggtgggggtagttaagtttagttattttttatttggttttttgttttgggttttgtattagagttgttatttttttttttttttttagtttttttattttcgtttttttagatattgcgttttttatttttattttgttattgttttattttttgatttgttttatttgagttttttagttggtttttaattgtttttttttttttttgtttttttttttttttttttattagttttatttttttttcggtagttttttttatttaatttttgtattttttagttttatgttttgttttatttttattttgtttgatttttggattttttttagattttttttttttagatagcgttaggtcggggtggggtcggggttggggtcgagttttatagttgttttttttttttttttttttgtataatttaataaagaaatggtcgcgtttttgtttttaatttgttttttgttttttcgggggttttagttagtgcgataaaagggtagagagggaggagggtggttgattttttattttgttaggatttttttttttgatataaaagtagtagtatatttttattatttacgatttaagaagataagattagttttttaggggtggtttggagtttagtttttttgagagttgatttatgttttgttttggatttttagggatgtttttttttagtaatatatatttttttgttaatttatataagatttagatattgttgagtttagtggaaagttattagttttattgtgttgaattaggtatagagaaatagtttagaaataggaagttttgtttttgagttgggagagggttggtagttttgggttttagtttgttaggatttggagtgagttgtttggtattagagatgttttttgtttggtatggaagcgagttttttttagttaagtagggaaattttgggtttcgtgttatttttaggtcggttgtatgtttcgttatttgttttttaattttttttgggttgggttggggagcgggagttgtatgatttttgttagttttgggttttttttagttttattgtttttgttttttttgagtttgatttttgttaggagatttttaagatttttgtatttttttattttcgtatggtttttgttttttttttttagttcggaatttttggattggaggatgtttttgagggtatggggatttgagttggagtggggaggggtgttgatttattaatagtattattttttttaggagacgttcgtaatttatttaaggttaggattatatattgttacgtatataggtatatttatagtttttatttttacgttttttaattttggtaaattgtataatttttttgaagtttagtttttttatttgtataatggggaaaagtattagattttatgaattattataagtaaagtgtttaatatagtgtttagtacgtaatgaagttttaatataatgtagttattttttatgttttataaagttggtatgtttagttttagatttattattttttggggtgtagtaaggttttttgtttattatgtttttagggatattgtattgatgggtggaaaggtaggtttaaaggggttacgaagttttgggaggttaagggaacgaggaaggagattgagtaataaggaaagagtttgttaagaaggaggtgtgaatattgggattgaggaggtagtttagagatgggtaagggggtagttttaggtagaaatggttcgtggaggtagaaggtttttgggagagggagtagtttggagggtggggtaggggcgaggagggggaggtggggagatttaggattgaggaagtaaataaggggagcgttattatagaggtggagaggtggagggtgttgttgttgggaattaatttttttagattttttattgcgaagcgaaatcgtaagttttggggtgcggggggcgggtcgggaggaggggaagtggggaaggtggagggaaggtcgggtataggggtgaaggtttagagattagtagaacggtattttagttacgacggttattttgttttgtttgtttttcgttacggttttgttttgttttttgggatattttcgtttttatttttttaggttgtttgatttgtttagttttttagtttttttttggatttcggtttttggttatttttttttattttttttttaaggtttttttttggtttttttttttttagaatttttttttttatttttttttttgtagaattttttttttattttttattttttattattgttttttttttttttttgatttttttttggagggtttagcgttgtttagattataggagagatgtgggaggtttagtttttgggtttgttgtttttgtagtcgttttgggtggttttaggtaaaacggggatggcgggagggttgatttttagttttataggaggggattagtagggatttttgtggttataaaggttttgaggtttttagttttgtggatttttttaattttttttttgggtagtttttttatttcgaaagtttttttgggtagagaagaaatagaaatttaagttttttttgtattttgtttttttttcgggaaatatttaggttttttttttatttttgtttttcggtttacgttttttttttttggttttttttttgtttatttagt

SEQ ID NO: 104 - DNA, 5689 bp, Artificial Sequence
  chemically treated genomic DNA (Homo sapiens)
attaggtgagtaaaagagaggttaaggggagggggcgtgagtcgagaggtaggggtagagaaggagtttgggtgtttttcgagggagaaatagggtgtaggaagaatttgggtttttgttttttttttgtttagagaggttttcggggtggaaggattgtttaaaaaagggattagaagaatttatagagttaaggattttaggatttttgtggttatagagatttttgttggtttttttttgtggggttggaggttaattttttcgttattttcgttttatttggagttatttaaagcggttgtagaaatagtaagtttaggaattgagttttttatattttttttatggtttgggtagcgttgagttttttaaaaggaggttagaaaaggaaagggggtagtggtggggggtggggggtaaaggagaagttttgtagagagggaggtggaggaaggggttttagaagaagggagattaggagagggttttggagagagggtggggagggatgattagaggtcggaatttagaggaaagttggaaagttgggtagattaggtagtttgaggaggtgggggcgggggtgttttagggaatagagtagggtcgtggcggagagtagatagagtaaagtggtcgtcgtggttgggatgtcgttttgttggtttttgggtttttatttttgtgttcggttttttttttattttttttatttttttttttttcggttcgtttttcgtattttagggtttacggtttcgtttcgtagtggaaagtttgagggggttgatttttagtagtagtattttttatttttttatttttgtggtggcgttttttttgtttatttttttagttttgggtttttttattttttttttttcgtttttgttttattttttagattgtttttttttttagggattttttgtttttacgaattatttttgtttggaattgtttttttgtttatttttaagttgtttttttagttttaatatttatattttttttttggtaagttttttttttgttgtttaattttttttttcgtttttttaattttttagaatttcgtgatttttttagatttgtttttttatttattagtataatgtttttgggaatatggtggataggaagttttattgtattttaaaaaatggtaggtttgaggttaggtatgttagttttgtggggtatggagaataattatattgtattgaggttttattacgtgttaagtattgtattggatattttatttatagtaatttatgaaatttaatgtttttttttattgtatagatgaggaaattgagttttaaagaaattgtataatttgttaaggttagggagcgtgaagataaaagttgtgagtgtatttgtgtgcgtgatagtgtgtagttttgattttggatgagttacgggcgttttttgggagaaatgatgttgttgatgagttaatatttttttttattttaatttaggtttttatgtttttagaagtattttttagtttagaggtttcgaattaagaggagaaggtaagggttatgcggagatggagaaatgtagaaattttagaaattttttaatagagattaaatttaggggaaatagaggtagtgggattagggaaggtttaagattgataagagttatataattttcgttttttagtttagtttagggagagttggagggtaggtgacgaaatatatagtcgatttggggatgatacgagatttaggatttttttgtttgattggaaggagttcgtttttatgttaggtagagggtatttttgatgttaggtagtttattttagattttagtaggttgagatttaggattattagtttttttttagtttaggggtaggattttttgtttttgggttgtttttttgtgtttggtttagtataatagagttggtagttttttattgggtttagtagtgtttaggttttgtgtgggttagtagggaagtgtgtattgttggggaggagtatttttgagaatttaaaataggatataagttagtttttagaagagttgggttttaggttatttttggagggttgattttgtttttttgagtcgtgggtggtaggagtgtgttgttgtttttgtattaaagggaagggttttggtagaatgggaggttagttatttttttttttttttatttttttgtcgtattgattggagttttcgggaaagtaggagataggttaaaaatagaagcgcgattatttttttattaaattatataaaaagggaggggaggggggtagttgtggggttcggttttaatttcggttttatttcggtttggcgttgtttgagaagaggggatttgagggagatttagggattaggtaggatagggatggggtaggatatgaggttgggggatgtagaggttaggtgggagaggttatcggaggaagaatgaggttggtaggggagggagaaagagagtaaagagagagaggagtaattgggggttagttggagagtttagatggagtaggttaggaggtggaataatggtagagtgagggtggagggcgtagtgtttggagaggcggaaatgagaaggttggggagaaagaagagggtggtagttttggtgtagggtttagagtagggagttaggtgaagagtggttggatttggttgtttttatttttatttttaggtttagagaggttttttaattttagtttgttggtaggggtttacgtcgatgttttattttttgttttttgtcgtttgggattcgttttattttgtggagagggagagaatgggggagttgtaaaatgggaggggagatttttttttgtttcggttttgttttagtttttatttttgttatatagggatttgggtttaaatttaaagggcgtttagttcggttgtatttttgatagttttttaggtttagtaatttagtttaaatttttttttcggtagttttttttagcgcgggttttttattattttttttttttttttttttatttgaggagttagaaatgggttattggggaagggtaggaagtttcggtagagttttcgtggtcgtttttagttttgttttaggtttttaaatttattttgattttgtttttttttgagttcggattttgttagtttagttttttttgtttttttttatttttttttttttttttattttttttttttttattttcggtagtttttttttttttttttttagtttcgtttttttttttttgtggggattaggagagggagtagttttaggttggttgtatgttttgtttattattattattaatgggattggagtttgggtgataaaagggtttgggatgggttatagggtggggtagtaagggtgatagggtttaggggaacggtaggatttagtattttcggaaggaaagtagaggaaggatgagatgattgggagggaagatggtagggtagatgtggtttttttttttatttttttatatttttattatttttttttttcgtttttttcggtttgtttttttttttattttttttttttttttttttaggttttgtaaaggagaaagaggttattttttttattataaatggtttgtagtttttaagtttttgtagttttagttttttttttgtagtgagtttagaggtgtgtgaattgaataaggtggttatagtttagagatagaataggggttttagggtttttatattagggttatgaaggggttgagattaaatatttttttttttaagatttaaggtgaggtgggaaagggatgaagaagtaggagcgggtaattagggtaatgatttttatttttattaagtttttttaaattttattggttgaagagtttagtttagtaaagtaaattttttttatttgtttgtagttttagtgtttcgtttttttttgtgttttttcgttttttttgtttgtttcgttattgttcgtttagttttgttttttgtttatttttggggtttttttttgaggatttttttttttgggtattttttttagttttttttttagtttttaaggtttttgtttttttttatttgtgtttttttaatttttaggtttttatttggttaaatattatattttagtatatttttagtattttttttattttttgtttttttcgttttaaaatagtttaagtagttttttttatttttgttttttatggtgtatgtatgggtgtagtggaagtagttatttacggtggaaatgtaggtgaagtagaagagaaaataaggaggggaagagtagtaggcgtgggaaataaggagagagtaataaataaggtttgtgattggggtgggataggaatggagaagagggagggattagtttaggagatttttttattagttagttttttttttttattttaagattttagtaggtataggttgacgttttgtgttgatatggtatatttgagttttttttggatattatattagttttttaatttagattttagtgttttttttatttattttttggtaggtatagtgtaatacggtaggtgtttttgtgtgatttgatttggtgttggtgtgttacgttgtgtatttgattttatgtgaatggaagttttttgtgtgagattattttgggcgggggggttttttttggaataggataggggataggagaggagtttggtgtagaacggttgttttggggggtatttaatttttttttttttttaagggtagtttagaattttttatttttattttagagagggtgtttttttattttatcgtgaggtttttatttttgtgttataaggttagtatggtatttttattatttagggggtttttttttacgttttgggttaggagagtaaagagttggttagtttttttttgggggttttagtattaaaagtttgtatggttttggtttgatttttttatttgggttgatgtagggagggagaatattagagattaaagtttaaggggtcgggttttttttttttttgttttgtttttttggttattgtttttttatgattttttttttaggagaatatgtgatttgggttttaggttttttgttaagtagttttttggttttatttatttaatataggtatatatatcgatatcggtcgatagttatgtatagatatagttagagaggagtatttacgcgatgggagatatatggtttagcgttgggttattttggtttatatttttgagatagtacgggagtatagcggagttatttagtatttataaagcgataatatggttttagaatatttacgtttttatatgtatatatgtaattgatacgggtagttttatatattcgttggattttagatatataaagatatttatttagtgaagttatatgttatcgtatagttcgtcggagggttatacgggcgtattttggtagatcgtatatagttttttttttatcgtcgttaattttattggtttttttcgttttatttcgcgggttttcgggagatttgtgtgacggttttttagtaattatcgcgttttttttttttttcgttatatatatatatatataagatagggtttttagtttttaaatttcggtcgcgttaattttttaaagcgatatttcgtaggttttttgggg

SEQ ID NO: 105 - DNA, 15767 bp, Artificial Sequence
  chemically treated genomic DNA (Homo sapiens)
taaaaaaaaaaaaaaaaataataataataataataaaaaatagtgtagagaaatagttaagttttggatgagggttagtattataagtttgtttaattttaaaagtatatagttgagtttgaaattgaaggggattagaatataatattttaaaatttattattttgatgtgttgattattttgatttgaaagtaattgagaaattgtagatgtaggagaggttttttgttttttttatttttatttaaaaataggatataaattttttatgagaaaggtgttatttttgtatttggaataagagaatatttttattattggagataaggagttaaaatagattttatttaatttttattttttattaattttttttatatatattttagttatttttttataatttattgtttttagtttaaattttttttttttttgttttgtaatatttttatagttgattgttttttgttaaaatggtatgtaattttttgggtttaatcgtcgttttgggatttttttgtttttttaggaagtttttgtgttatataaaaatattaatattaaataaaattattgtgtttttttttttgttaatttgttttttgttagtttaatttataggttttagtttgagaattaaagagggtagaggaaaagtttttttttttttataaaattaagttagatatgaggaaagttttgtttttttttaaggtgtgaaaggagtattattattatttgttttgtttagtttggtagttttataagtagtattaattataaagatagaagtaaaagtagtatgataagaaggtaggagtagaggaatagatagttttgttttggtgtatttatgaagtagtataataataatttttagagagaggtgggtttgattttgggtttttattgttttgaattttgggttataataatttgatttaaaaaataaataggttgggtatggtggtttatatttgtaattttataattttgggagattgaggtaggcggattatttgaggttaggagtttaagattagtttggttaatatagagaaattttatttgtattaaaaatataaaaattagtcgggtatggtggtatatatttgtaattttagttatttagaaggttgaggaagtagaattttttgaatttgggaggtaaggttgtagtgagttgagatcgtattaatgtattttagtttgggtgatagagtaagatttcgtttgaaaaaaataataataaaataagataaataaatatatattgggaaatataatgataaagagtaaaattgattatataatatttaaaatatttacgtaaaattttagatgtaaataaatataattatttggaggtaggaaagtaggtttgaataaaaagtagaattataattaaatgtagagaggggaaaaatataggttagtttaatattaattggtgtttataagatataatataaattattgttttaattttttaatgaaattattttaaaaatatttagttttttgttaaatttagattataaaagtatattttggtttgtatatttttgaaagaaagtatattagtttttgagttattattaggaaagagtttgaagagttaaataaagagttataggattttaaattatttttagattataaatatatggtaataaggaagtgaatgtatgggttttattagataggaaattgggtagttttgtggggttatttatggggagatagttgattataagggataaattgtatgtaaatgtagtagaataaaagatagtataataataaaaataatgatttgggatttgtatgtaaatatatgttaatatttaatataaggatgtttgaatttttgaaaatttttggggtttatagtttgttgtttttttattgaaatggatgttgattagtagaaataaatatatttttggtgtttttttttatgtttttttttttttttttatatttttgtaagaattgttttttagtatgggtgttggtagtttgattttttaatggtattatgagttaattgggaatgtagaaattatggtgtttattatttcgttaaatttttttttttaatttttgtttgttaagaagatgtgagattatttggaaaaagaaagagtagattattaataaaaattaagtgtaatttaatattattggtttaagttaaaaattttgttataaaagtaaattggaaattatagttttgaaatagagtaatggagttttaaataaagaagtattttgttgataagttagttaaattttataattttttaggtaagtaaattgagattgagagattgttttagtgatatataattagtgagtggtaaagttgggattaaaatttaagttagtgttttttttgggtaattgggaaaatatttagataaatagtttgttaggggttgtaatatatgaatttatgatatagtttgaggaattagagatttttaatttagaaagagaacgatttagggatatggtagttatttttaaatatttgaaggtagaaaaggttttgaatttattttgttagttaaaggagattttaatagtttaatataagataaaattttttaaatagttaaatttggttaaaattattggggggtgagggatgatgagttttttgttatttgaggtattttataatagattgaaaaataatttagagagtatgtttttgtttatagagaggggtgaattaggggtgtgtaggagagaatttaggtatgaatattatttggatgaggtgatttgtaagaggatgtggttttttatatttaaattttgggattaaataaggttttatttttgtttttaaattttaaaatttatttttttatttgtttgtaatagtttatattttaatttattttatattttagggtattatgttttgaatatgtgatttgaatatcgtggtagaaggttatttatatttatttattttattttatttttatatatttgtagtgagttttttgaatttattatgtaaatatatgtaaattatatgtaaatgatatagtttaagaaaatgataaaatttgatggttttaattgagttattagatttttttttaagaaggaaagtaatatgttttttaatatttttggggtaggagataattttttgagagtgatatttatacgatattggaattcgttatttagtttttgttttatattttgtatatttatgtgggattttaagataagaaaagtatttttatatatatgattttatttgatttttataattattttgtgatgtaggtagaagaggaattataatttttgttttttagatgggaaaacggatttagagaagtgaaatgatttgtttaaggttatttagttggtaagtaaggatttgcggtttattattagattttttttagtttttagttttttttaatatatattgatggatgttttatttgaagtaaggtggttcgttattggtttgggtttgtttagattgtgttttgttgatagtatttttagagatgattttgttgatgaagatggtattttaagggtgattaggaaaagtttaaatatgtgtagtaggtttagtagattgttaagtatatattttttttaattttttttgttttttagtattttttttgaaatttttagatgaataatatttttcgttttatttattttttagtttttttaggaggtaaagtttttttttaaattgtgaagagtagtagtatagtttttgtagtgagattttttggatttgaagttttaatttattattttttaattgtgtggtttggagagattatttaattttttttaagtattagtttttatatttataaaatgagggaaataataatattttttttatagaatatatggaaatattcgaggataggaaaatgtagtaaaaaattgtattaaatttgatttagtgtttgatatatagtaaggatttaataaatggtagatattatagttatttgatttattatagtaatattgtagaggtggtggtggtggtggtggtggtagtagtagtagtagtagtagttaagttattgtgaattttgatattaagaattgggtttttggaaatggagtgggagaatagtaatattaaatatattttgtatgttagagggttgaagaatagatagaataggtagttaaatgtagtttattgaggaatgtttgaattttggttttttttaattattgttatattttgttttataataagggtaattgtaattttgttttaaagttatttttaagaagaaatagagttaaggttggtatttttaattttatttttttttagttaggttgttttatttatggtagtgttttttatttttttaggttaggttaggagggaataagagagtttattttaattgttttaataagtttgaatcgttaggttaagagatgaagtaattttttttttatacgaagattagaggtggggatggataaggtggttaaggtagtagttgaggtttaaggagtagatatatttttaagtttgtttttttttgttttagtttttagtttagtaggtgttattgaagggtttagttttttagtttgtttttgtagagtgttttgtttttttatgttttttgatattttttttatttatttatttaggataattaagaaagtggtttttttggtgagtagagtttttatagtttttttcggggaaaaggattagaagttgttggagttggttaaatgtttgaagttggtataaagttaattggaattattataatgagagtttgtgtgattagtttaaaaggattgtataattgatttatgtttagtgttaggaaatgtaacgggttattttggggttgggtttttagttatttttggtaaagatgggtggtatgtaaaagggatttttttttttttttttttttttttttttagtatagagttatagaatgttgagtagttaatagtattttttgttttaagattatttttttgagtatttttttggttgttaaattgttagggtttttatagtttgattttattttttagttttaagtattaggtaaatttattaagtaattttagtttgtgatggcgtttgacgttagttgttttttttgggtggtgttgttttttgtcggttgtaaagttattattttttgggattagatgtgtattgaggtgagtttaaattgtttgtttttatgtagattaaattgtttgaaaattttgagatttagtacgtagtttaatttgagttttggtattttaatatttagtgtttttaaaaaggaaataaggtgtatatataatttttttattattgtgagaaaggagttaaagaattttgttaggggattatttggtggtattttaataggaagtaaagagaattttttttttttttaaataattttatttaaataattttaagtgggttataagatattaatagggtttgtgtgtataaagtagatttttaaatttgttttaatttaggggagttgttggtttaatatttttatttttatatggtttttattttaatgagttttttggtttttttttagggtgagaattagtaaagatagcgttgtgttaggttttcgagtattgaaaagattattttgaatgagtttggtttttttttggatttggatagttttttatttgttttattaatttataggaggaaaatttgagaatagagttaaattgtattttttgttttggattatagtaatatttattaatttgtgggaagtttttggaggggataatgagagaaaaaggagaagggttttcgttttttgttattttttaaaatgttttaaatttttttttattttttttgattttataagtgattaatattacgtggtttgttagataagggttgtatataggaggaattatgagttttggtggtttggtgagttgttggtttgggttgaggtaaaaagaagagtaagagttaggaatagttagatgtggagttgttttggggtaggattagaaggagattagaggattaggaagagtagagtaaagttagtattggggtaaggtttagagttgggtgagtagagttttgttggtttggtattaggatggaattagtagtaggttaagaggaggtattatgttaatgagaaatgaaggttgggaaggtgtgtgttgttttgtttgggttgttataataaatgttatagattgggttaggcgtggtggtttacgtttataattttagtattttgggaggttaaggtgggtgtatgttttgagattgggagttcgagattagtttgggtaatatggtaaaattttatttgtattaaaaatataaatattagttgggtatggtggtatatgtttgtaattttaattattcgggaggttgaggtaggagatttatttaaattcgggaggtagaggttgtagtgagtcgtgattgtgttatcgtattttagttttggcgatagagtaagattttgttttaaaataaataaattaaaaatatattaaaaaataaaaataaattaaaaaaattttgaatattatagattaggtgatttaaataagagaaattgattgttttatagttttggaggttggaattttaagattaaggtgttggtagagtttgttgtttttgtattttcgttttttggtatgtagatggttattttttttttgtgtttttttatggttttttttgtgtgtatgagtattggtgtttttttgtttgtttaaatgtttttattttttaaggattttagttagattggattagggtttatttatatgattttagttttttttaatgatttttttaaaggttttgtttttaaatatagttatattttgaggttttgtgggttaggattttaatatatgaatttggtggtgggggagagaaaatttagtttataatagaaggagaagagtaagatatttttattagttttagaaggttgtttttttattttttaggttggaaggtttgtaattgtttgataagttttttttgtttattgtttagataaaattaatttattgagattacggtattgtagtaaagaaagtttaattgatgtgagattggttacgttaggtgggagatagagttattatttaaattaattattttaaagttttggagattaggagtttttaaggatagtttggtgggtagggtatacgggaatggtaaatgttgattggttggggaagaagttataaggttttggaaaatggtttttagttttgagtttatttttgggtgaggtcgtaggatggggtgagttaggagtttgggtggggttagtttgaaagatattttaaaaaaaaattttagattttataatagatgttatttataggagtaattggggaagttataaattttgtgatttttggttatatgatttttgaatagtaaggagtaattatgttaatattttaggtaaatttaagttttttttataattttaacgggtgatttttttttagttttaaaaaggtgtttttgttttaagaagggttattattatttttgttttaaggttaaagtataaattaaatttattttaaatttagtttggtttatatttaggaatgattaaggagaaattggaggttagaagtaagatggagttaattatgttatattttttttgttgttataattttgtaaaggtggttttaggttaatgttatatagatatttgggaggtatgataagtgggtaggaataagggtattatttttttagtgattaggaatataggttattatttttaggagatagtttttaataggataatattattatttaattttattttattgggaagtaggttgttttaaatgttttatttttatatatttataagtttaattttgaaatttttgtattagcgggaggttttttagttttttggttgtttgttttggggtttttagtgttatttatgttttaggagtggtgtttagtgttttagggtttgtaagtttagttttgtgtggtagtaaagttttttttttttggataagttagatgaaattgaaattttttaatataataatatttttgtagttttttttttgaaagaagtttgattttaaatgattttgttagttatttagttagtattagatttgtatttttttttgttttatttattacgtgtgagtgagtttttaagaataagattcgaaggttgtttagggagtttttgttattgtgtggatattagggagggagttgggggatgtaaagaaaaatggaatttatttttgagattttggaattttttaggttgttggtaagggataaaaggaggggtggttaaaagaataaatttttgtttttgatttaagggtttggtcgttttttaagggtaaattatttcgaattttatttatttttttaagttgtttttttttttttttttttttttttttttttagtttatgtatagttaattatataatgtttgtatgtttatgtgattgttattattttattaagtttgtgaataaaagttttttgaggtggaatttgacgaaggagattttattttaatgaatagttcgtaaattgaggagatacggtttttggtacgtagtttttggaaggtgtattttagggaataaatgaggaatttggtttttatagagagaaatttttttatttagttttttaattaaatttatttacgtagtagaaggatttaaatttgtttagttttgatcggttggtgtagttggattttgattggttgataaagttgagttttgattggttggtttaggtgagattagaaagttttaaaattaaatagagatgggggtttttagaaatttagagtatatgtgtgatttttagttagtaagtggttgttcggttgtatttaaaatttaggtttagtttgttatttgggatttgatatagtttggatttgtgtttttgtttagattttatgttgtattttaatttttagtggtggaggtagggtttggtgggaggcgtgtgggggtagtttcgttatagtttggtgttgttttggtgataatgagtttttttgagtttgagatttggttattgaaaagagtggtattttttttgttatttttttttttttgtttttattatgtagcgtgtttgtttttcgtttgttttttgttatgattgtaagcgttttaagttttttttagaagttaagtagatgttagtattgtgttttttgtagagtttgtagagtagtgagttaattagattttttttttttataaattacgtagtattgtttttttttttttttttttttttttttttttttttgagacggagttttattttgtcgtttaggttcgagtgtagtggcgtgattttagtttattgtaagttttattttttaggtttacgttattttgttttagtttttcgagtagttgggattataggcgtttattattatatttggtaatttttttgtatttttagtagagacggagttttattttgttagttaggatggtttcgattttttgattttttgattcgtttatttcggttttttaaagtgttgggattataggcgtgagttatcgtgttcggttttaaagtttttaattttaatatattttaatttattttttttttgtatttttagtataattttgttttgtttaagaaatttttgtttattttaagatcgtgatattattttatgttttttttagaagttttattgttttgtatttatttgttatttttaggttttatatttagatggattaaaattgtttttgttttttatatataagtaggagttaagattaatttttaaataaaattttttgtttggaaaaatatttaaatttatttataagttttgagattattatagtgaatatttataggttatatagatttttttattgttaaatgttatatgttttttttttttgtttttttttttttttgtgaatgtttgtgtttttatatatgtgtgatttaagtaaaaatattaggattcgtattaagtttttggaagttgataaatatgtaaagaatagttggaattcgtgttttgtgatttggattgtggtattattttagatgtatttttgaaatatttatttgggaatgtgggtatgttttttttttttaagtgagtttagtttggttattttttttttttaaaattgtgatagaagtgagttttttagtttttaggtgtgggatggggattggttagtagagtttttttttgaaaggaattttaagtttatagatataagggttttttaatagttttcgataatgatgtgaggttgtgatgatttagttaaacgttaattttttttgtttagtgttgatatatattatcgtattaatttttatagtaaatttgtaaggcgaagtttttaattttaatttatatttgaggaaaagggaggtttagagaatatagtttggtggttgagagttaggatttgaatttaagtagtttgattttatagataaatagaaaataaagtgtatgtaattggaatgttttttgtttggaggaattagattgataatgaagttataggaatgtgttttttagggagtgtttgttttgtttttagagattaattgttgttttgggatttggtttagtcgatttgttttattttggatggaggtatgtttaatgaggaagcgttggaggttagtgttttagatttttgatgtatggggaggtggttgttgcgtgtgttaagcgtagatgagaaattcgaaaaggtgagaataagtatttgagtgaaatttagagttttaaattagaaaatgttttaatatttgtaaggaaagaaaatatagtgggatgagagggagttagatatatagtagaagggaggaaaataagagtttgattgagaaaatgtaaatgaatatttagagggaaaagggattgtaaatatagatgtagttttgggagtataggtttgagatagagttggagataaagtagatgatataggttttagtgtatagtgagttttaagcgaatgttttttgatttagaatagtgatgggtatgaggtaattgttatgaatattacgtggttttgttatagttttattcgttgtgtgagtttatattaagaagttttatttgtattggagttagtagaagtagagaggtgagaaagggattttggaaattaattatatttttagatttttttaggaagagaaggttgggtttataggaaatggttatgtggagattcgagaaattgtaatggtagtgggtgtttgtttggaaaaagtaatagaagtacgtggttttggcggtggttatgttgtttgttggggtttagtgttttttttttgtattttgtttttttattttttgttgtattatcgttgtgttgttttggaattttggttattagaatttatgtttaaaaatgttttatttgaatattgatagggagaatgatatatttttattaatgtagtatttttattaaaaatgtgtaattagagttaaattatgaggaatatataaatttataattgggatattttgtaaaatataggtttgtattttttaaaggatatttatgttgtgaaagataaaggttgaggaattgttttagattaaaggagtttaaggagatataataattaaatgtaatgtgtgattttggattggaaaaataaaaattattataaagaataataatgggataattggtaaaatttggatatagatagtatgttggataattatattgtattaatattaaatattttgaattttataatggtattatagttatataatatttttgtttttaggatatataaatattggtgtatagggtttaagggttatgatgttagtagtgtatttttaattaaatagaatgtgaagaatagtgtgtgtgtgtgtatgtgtgtgtattttttgttttaaaaaattataatagtttgaaaataatttaatgttttttagataattttagagtatgtggtgttttggtgtttttattatcgtggttattttgatgatataattgtgattataaaagttataagggaagggttacgtgtatgttgagttttagatattttttaaaatgtgtttggtttttaaatttttttattagttgtgttttttgttatttgttttttttttttagaaattaaaggtataggatttattgttatttttatttaattagagatgatttaatattatggtataggtttatggtggtttttttgatttttttggtagcgttatttattcgttattagttttttattgggttgaaattaagttattttatttatttgttttttatttttaaggagtttatttaggttattggtttagtagagttttttttggatttttaattttttgtattatattagggtagtaaagtgtttagtaaagtatataaaaggttgaggtatagaataatttaggtgttatgggtatttatatatttaggagaaggagggaaatgatagtattgagttttttgttgtagggtcggaatagagtgagataaattgaggaagttttttttttttaatcgtatgtgatattagttatgttaaaggagacgagaaaagtaaaatgttttttttaagttaattagtatttttgtaattattggggtagtagttgtatatatatattttttttgggtcgtttatatttatgggtattgaggataggtttggtaatacgtggtttttttttttattagttagttaaatttaagttttaaatgcgaagtgtgtattttaaggatattatgtggatttgtggtagtgtttggaggattttgggtttataaaatgaagaataaattataaggatatataaataaagtatttttattagtgatagttataatgttgttataatattaaagaaaattggtgattttttgtagatgagtatgtttgtggttataagaaagtgtatcgttaagtagaaattggagtgaaagaaaatgaggttataatggtgatattttaaaagttttttgttttaaagtaaagtaagatgtgtgtagttttgttttttattaagtagatttgtttgtaattcggtataagaaaagatattgatttggagttcgtaatagagtagattttttttagtttagggaagttttagtggggtttttggtgaatttttatgtgttaaggaaaggtaggggttggaagggtgaatgaatttatttggagtttgagatgatttgagagttggtttaaggttttgggatgtttttgtttttgtgtttttaaggttattgttttagtcggttttttgttgttttatagaatgttatagtttgggtaatttgtatagaaaagtaatttattttttatagttgggagttaggaagtttaagagtttggttttggtatttggtgagggtttttttgttgtgtgattttatggaggaaggtgaaagtaagtatgtggatagagtaaatggaggtttaatttatttttaattttttttttttttttttgaggtagagttttattttgtggttaggttggagtgtagtggtgtaattttggtttattgtaatttttgagtttttggtttaagcgatttttttgttttagttttttgaatagttgggattataggtatgcgtaattacgtttagttaatttttgtatttttagtagagacggggtttcgttatgttggttaggatggttttgaatttttgatttcgtgatttgtttatttcggttatttaataatttatttgttttattaggagtttagtttcgcgataattaatttattttgtaataatagtattaatttatttatgagtgtggaatttttatgatttaattattttttaaaggttttattttttagtattataatggtaattaagtttttaatatatgaattttggaggatatatttaaagtatagtaggaatttttttttatatttttttaaggagattttataggtaaaatatattttattagatttttatatttgttttgttagatttttttattttttttattattttttattttaaagtattagttagataaataatgattttatagttttataggtttttaaaaaattattttttatttttatttatttagtttaatatataatttgtattaggatatgattggtaggttttagaatatatgattattttggggtataggatgaggaagttatttgtatttatgtgtagggttttgtttaaaagtttattgtttggtattagtagtttataaatatagagatttaaaattaatttatattttaagattgtaaggttttaggtttatgttattttgttagtttttttaagtattgtgttaagaaaaaaatgttaaatatatatagaaatagtaataaagaattttaatattcgataattataagtatttgtttatttattttatttttgtattttttttttttttttttgttagattattttagagttaattttagtattatgttgttttatttttaaatatttaaatatgttttttaaaagaataagaatattttttttaaataattataagtttattgttatttataaaatttagaattttttaatattattgaatattgtttttatttaaaattatttgatagtttataaaatgtttttttgaattgttttatttggattaggatttaaatgaggtttattgtattatttgatggttatgttttttaagtagattttatatttttgtattttttaataagtattatttttttttttatttttttttttttttttttttttttttatatatatatatatatatatatatagatagaataaagttagttgttttatagaatgttttatttaaatttattatattattttgagatgtgaagttaaatttaaaattttgatgagtttaaagtttaattatttttttggtaagaatattttatagataatgttgtatattttatattgttttatatacgaaagtatgtaatgtttgattgttttattttggtgatgtttatttaaggtcgatttgtttgttttaaattgaaattaaatatttttatttaattaaaattaaaattgtaaaattaagtgtatttagagaagttttatatttatttttgtttttttatttggttttttttttttttttaaaggtaattagtttttgggtttttgtatggtttgttttaataaatataagaaaatttatatatattttttttatataaaaggtatattttgtatattatattatatattgtatattatatatattatatatattgttttgtattttgttttttttattttgaaatatattttagatattattttatattaatatatggagggttttttttattttttttagttttagaggattttattttgtgaatgtattatgttttgtttaagtagttttatattgatgaatagtttggttattgttaattttgttattataaaaaaagtattatagttaataatgtgtatttattattttgtttttggtaagtgtatatttggtaaagattattagaagtacgattgtcgttcggaaggtaaaatatatataattttgttagatagtttataaaattattaagtttaatattaatttattttgttttttttattaga

SEQ ID NO: 106 - DNA, 15767 bp, Artificial Sequence
  chemically treated genomic DNA (Homo sapiens)
tttgatgggagaaataaagtaaattaatattagatttaataattttatagattatttagtaaaattatatatgttttatttttcgagcggtaatcgtatttttagtaatttttattaaatatatatttgttaaaaataagatgatgaatgtatattgttaattgtagtattttttttgtaatagtaaaattgataataattagattatttattaatataggattatttgaataaaatatggtatatttataaaatggaattttttaaaattgaaaaaaataaaaaaaattttttatatattgatatggagtgatatttgggatatattttaaggtgaaaaaagtaaaatgtagaataatatatgtagtgtatatagtatatagtatgtagtataatgtatagagtatgttttttgtgtaagaaaggtgtgtgtgaatttttttatatttgttaaaataaattatgtaaaaatttaaaaattgattgtttttaagaagagggaagagattagatagaagagtagggataaatgtgagatttttttgaatgtatttggttttatagttttgattttggttgaatggaaatgtttaattttagtttgaaataaataaatcgattttagataagtattattaaaataagataattaaatattatatattttcgtatgtgagataatgtgaggtatatagtattgtttatgaagtatttttgttaaaaaaataattaaattttaaatttattaagattttaggtttaattttatattttaaagtgatatggtggatttaagtgggatattttatggaataattgattttgttttatttgtgtgtgtgtgtgtgtgtgtgtgtgaaagagagagagagagagagagagaatgagagaggagatagtgtttgttaaaagatatagagatataagatttatttaagagatataattattaaataatatagtagattttatttagattttgatttaaataaagtagtttaaaaaggtattttatagattgttaggtaattttgaatgaggatagtatttaatgatattaaggaattttggattttgtaaatgatagtggatttgtggttatttaaaagaaatgtttttatttttttgagaagtatatttaaatatttaggagtaaaatagtatgatgttggaattggttttaaaataatttggtaaaaaaggaggagaggaatgtagagatgaagtgagtaggtaaatgtttatgattgtcgaatattgagattttttgttattatttttgtatatgtttaatattttttttttaatatagtgtttaaaaaaattagtagggtggtatagatttgaggttttgtaattttgaagtatgaattaattttagatttttgtatttgtaggttgttgatattagatagtaggtttttgggtagaattttatatataagtatagataatttttttattttgtgttttagggtagttatgtattttgaagtttgttaattatgttttaatataagttatgtgttgaattaagtaggtaaaaatgggaagtggttttttagaagtttgtagaattgtggggttattatttatttggttaatgttttaagatgaagggtagtggggaaaataggaaggtttgatagggtaggtatgaaagtttgatggagtatattttgtttgtggagtttttttggaaagatatgaaggaaagtttttgttatgttttgaatatgttttttaaagtttatgtgttgagaatttaattgttattgtaatattaagaggtgaggtttttgggaggtgattggattatgaagattttatatttatgaatgaattaatattattattgtagggtgggttagttatcgcgggattggatttttgataaagtaagtaagttattgggtggtcgaggtaggtagattacgaggttaggagtttaagattattttggttaatatagcgaaatttcgtttttattaaaaatataaaaattagttgggcgtggttgcgtatgtttgtaattttagttatttaggaggttgaggtaggagaatcgtttgaattagggatttagaggttgtagtgagttaagattgtattattgtattttagtttggttatagagtgagattttgttttaaaaagaaaaaaaaaagattgggggtaagttaggtttttatttgttttgtttatatgtttgtttttatttttttttatggaattatatagtaagaaggtttttattagatattagagttaggtttttggattttttagtttttaattatgagaaataaattatttttttatataaattatttaggttgtggtattttgtgaagtagtaggaaatcgattaagatagtgattttggaagtataagaataaggatattttaggattttgggttagtttttagattattttaggttttaggtgagtttatttatttttttagtttttgtttttttttgatatataggggtttattagaagttttattgagatttttttaggttggaaaagatttattttgttacggattttagattagtgtttttttttatgtcgagttataaatagatttgtttagtgagaaatagaattgtatatattttgttttgttttgaagtaggaggtttttgagatgttattattgtaattttatttttttttattttaatttttgtttagcgatgtatttttttgtagttatagatatgtttatttgtagaaagttattagttttttttgatattgtgataatattataattgttattgatgaaaatgttttatttatatgtttttgtaatttattttttattttatagatttaaagttttttaggtattgttataaatttatataatgtttttgaaatgtatatttcgtatttaaaatttagatttagttgattggtgggggaaaaaattacgtgttgttagatttatttttagtgtttatgaatatggacgatttagagagaatatgtatgtgtagttgttgttttagtagttgtaaaggtgttgattagtttagaggagatattttgtttttttcgttttttttggtataattgatgttatatacggttggagaaaagggatttttttagtttgttttattttatttcggttttatagtaaaaggtttaatgttgttattttttttttttttttgaatatataagtgtttatgatatttaaattattttgtgttttagttttttgtgtgttttattaagtattttattgttttaatgtgatgtagaagattgagaatttaggaggagttttgttaagttagtggtttgagtgagttttttgaaaatagaaagtaggtaaatgaagtagtttggttttaatttagtgaaaaattgataacgagtggatgacgttattaagaggattaaggaggttattataagtttgtgttataatattgaattatttttggttaggtggaaatggtaatagattttgtgtttttgatttttaggagaaagaggtaagtgataagaaatatagttgataagagaatttagaaattaaatatattttagagaatgtttagggtttagtatatacgtagttttttttttatagtttttataattataattgtattattaaaatggttacgatgatagaggtattaaagtattatatgttttggaattatttaggaagtattagattgtttttagattattgtaattttttaaggtaaaaggtatatatatatgtatatatatatattattttttatattttgtttgattgagagtatattattgatattatgatttttaagttttatatattaatgtttatatattttaaaaataaggatattatatgattatagtgttattatgaaatttaagatatttaatattgatataatgtaattatttaatatattgtttatatttaaattttgttaattgttttattattgttttttatagtaatttttgtttttttaatttaggattatatattgtatttagttgttatatttttttagatttttttaatttgagatagttttttagtttttgttttttataatatgaatgttttttgaagaatgtaggtttatattttgtagaatgttttagttatgggtttgtatgttttttataatttgattttggttatatatttttggtagaaatattgtattagtaagggtgtgttattttttttattaatatttaaatgaaatatttttgagtatgagttttgatagttagggttttagaatagtataacggtaatgtaatagagagtgaaaggataagatgtagagaaggaatattgggttttagtagatagtatggttatcgttaggattacgtgtttttgttattttttttaggtagatatttattattattgtagtttttcggatttttatatgattattttttataaatttagttttttttttttagagaagtttagaaatgtggttaatttttaaagttttttttttatttttttgtttttgttggttttagtgtagatgggattttttgatgtgaatttatatagcgagtagagttgtggtaaggttacgtggtatttatgataattgttttatgtttattattattttaagttaaggggtattcgtttgggatttattgtgtattgggatttgtgttatttgttttgtttttagttttgttttagatttgtgtttttagagttatatttgtatttgtaattttttttttttttaggtatttatttgtatttttttaattaggtttttattttttttttttttgttgtatatttaatttttttttattttattgtattttttttttttgtaagtgttgaaatattttttaatttggaattttgaattttatttaagtgtttatttttattttttcggattttttatttgcgtttgatatacgtagtagttatttttttatgtattagaagtttgggatattgatttttaacgtttttttattaagtatgtttttatttaagatagagtaagtcgattgagttaaattttagagtaataattagtttttgaaaataaaataaatattttttagagagtatatttttgtaattttattgttaatttgatttttttaggtaaagggtattttagttatatgtattttattttttgtttgtttgtaaagttagattgtttgggtttaaattttagtttttaattattaagttgtgttttttgagttttttttttttttaaatgtagattgaagttaggaatttcgttttgtaagtttattgtgaggattaatgcgataatgtgtgttagtattaaataagaagagttagcgtttaattggattattataattttatattattatcgaaagttattgggaagtttttgtgtttatgaatttggagttttttttaaaaaagagttttgttaattagtttttattttatatttagggattgaagggtttatttttattatagttttgagggaaaaggatggttaagttgagtttatttgaaaaggggaggtatgtttatatttttaagtaaatattttaagagtgtatttaaaatgatgttataatttaaattatagaatacgaattttagttgttttttgtatatttattagtttttaaagatttgatacgggttttaatatttttgtttaagttatatatatatagggatataaatatttatagagagagagagagatagagagagaaaatatgtagtatttgataatggaagaatttatgtagtttgtaggtgtttattgtaatagttttagaatttgtaggtaggtttggatatttttttaaataaaaagttttatttaaaaattaattttgatttttatttgtatgtaaaaaataaaaataattttgatttatttaaatgtgaaatttagaaatagtaaataaatataaaataataaagtttttagaagaaatatgggataatattacggttttgaggtaggtaaagattttttaaataggatagaattgtattgaaaatataggaaaaaaataagttgaggtatattaaaattaagaattttggggtcgggtacggtggtttacgtttgtaattttagtattttgggaggtcgaggtgggcggattaggaggttaggagatcgagattattttggttgataaggtgaaatttcgtttttattaaaaatataaaaaaattgttaggtgtggtggtgggcgtttgtagttttagttattcgggaggttgaggtagaatggcgtgaatttgggaggtggagtttgtagtgagttgaggttacgttattgtattcgagtttgggcgatagagtgagatttcgttttaaaagaaaaaaagaaagaaagaaagaaaaaagaaatagtattgcgtaatttataaagaaaagaggtttaattggtttattgttttgtaggttttataggaagtatagtgttggtatttgtttggtttttggggaggatttgagacgtttataattatggtagaaggtagacggggagtaggtacgttgtatggtgaaagtaggagagagagaatgatagaggaggtgttattttttttaatgattagattttaggtttaggagaatttattattattaagatagtattaagttgtgacggagttgtttttatacgttttttattaggttttatttttattattggggattaaaatataatatgagatttgggtagggatatagatttaaattatattagattttaagtggtaaattgggtttaaattttaaatatagtcgagtagttatttgttgattagaggttatatatgtattttgagtttttgaaaatttttatttttgtttaattttggaattttttgattttatttgaattaattaattagggtttagttttattaattagttagggtttagttgtattaatcgattagaattaagtaagtttgaatttttttgttgcgtaaatgaatttgattgggaagttgagtgggaaaatttttttttatggaggttaagttttttatttgttttttggaatgtattttttaaaggttacgtgttaaaggtcgtgtttttttagtttgcgaattgtttattggaataaagtttttttcgttaaattttattttagagaatttttatttataggtttaatagggtaatggtagttatatgaatatgtagatattatgtggttaattatgtatgagttgaagggggaagaagaaaagaggaaaggaaagtagtttggaagggtgagtaaagttcggggtaatttatttttgaaaaacggttaaatttttaagttaaaagtaagagtttatttttttagttatttttttttttattttttgttagtagtttggaaagttttagaattttaggaataagttttatttttttttgtattttttagttttttttttagtatttatatagtagtaagggttttttaaatagttttcgaattttgtttttgagaatttatttatacgtgatagatgaaataaaagaaaatatagatttgatgttaattgaatagttgataaggttatttaaaattagattttttttagagggagggttgtaggaatgttgttgtattggaaggttttagttttatttggtttatttaaaaaggaaagattttgttgttatatagggttaggtttgtaggttttagaatattgagtattatttttgagatatgaatagtattgaaggttttagaataggtagttaaaggattagggggtttttcgttgatgtaaggattttaaagttaaatttgtaggtgtataagagtggggtatttaaaatagtttgttttttaatgaggtggaattaaatggtgatgttattttattggaggttgttttttggaggtgataatttatgtttttgattattggggggatggtgtttttatttttatttatttgttatgttttttaaatgtttgtatgatattgatttgaaattatttttgtaaaattatgatagtaagagaaatatgatatagttgattttattttatttttaatttttagtttttttttggttatttttgggtgtagattaagttgaatttgggatgaatttagtttatattttaattttaaagtaaggatggtaatagttttttttaaaataaaagtatttttttaaaattaaagaaaggttattcgttaggattatgagaggggtttgaatttgtttaagatgttggtatagttattttttattgtttaggagttatgtggttagaggttataagatttgtgatttttttaattatttttgtagataatatttattatagaatttaagatttttttttgagatattttttagattaattttatttagatttttgatttattttattttgcggttttatttagaggtggatttagaattaaggattattttttaaaattttatgattttttttttaattagttaatatttgttattttcgtgtattttgtttattaaattatttttgaaaatttttaatttttaagattttggagtgattgatttgagtaataattttgttttttatttggcgtggttagttttatattaattaaattttttttattgtaatgtcgtagttttagtggattgattttgtttgggtagtgggtaggaagaatttgttaggtaattatagattttttaatttgaagggtgaggggatagttttttggggttgatagaaatgttttatttttttttttttgttatgggttgaatttttttttttttattattaaatttatatgttgaagttttaatttataggattttagaatgtgattgtatttagagatagggtttttaaagaggttattaagggaagttgaggttatataggtgggttttaatttaatttgattggagtttttaaaagatgaggatatttggataaataagaagatattagtgtttatgtatataggaaaggttatgagaggatatagagagaagatggttatttgtatgttagggagcgagggtgtagaagtagtaaattttgttaatattttgattttaaaattttagtttttagaattgtgagataattaattttttttgtttaagttatttagtttatggtatttagggtttttttggtttgtttttgttttttggtgtatttttggtttgtttgttttaagatagagttttgttttgtcgttaaggttggagtgcggtggtataattacggtttattgtaatttttgtttttcgggtttgagtgagttttttgttttagtttttcgagtagttgggattataggtatgtgttattatgtttagttaatatttgtatttttagtatagatggggttttgttatgttgtttagattggtttcgaatttttagttttaaggtatatatttattttggttttttaaagtgttgggattataggcgtgagttattacgtttggtttagtttgtggtatttgttatgatagtttaagtaaagtaatatatatttttttagtttttattttttattggtatgatgtttttttttggtttgttgttgattttattttaatgttagattaataaggttttgtttatttagttttgagttttattttagtgttggttttgttttgttttttttgattttttgatttttttttagttttgttttagggtaattttatatttggttatttttggtttttatttttttttttattttaatttagattagtagtttattaagttattaagatttatggttttttttgtatgtagtttttgtttgataggttacgtggtattgattatttgtggggttagagaaagtgggaggaagtttgaagtattttagaggatggtaagagacggaggtttttttttttttttttttattattttttttaagaattttttataggttgataaatattgttatggtttaaaatagaaggtgtaatttggttttatttttagattttttttttatgggttagtaaaatagatggaaggttgtttaagtttaagagagagttagatttatttagagtgatttttttaatgttcgaaaatttggtatagcgttgtttttattaatttttattttgagaggagattaaaggatttattgggatagaggttatgtgagagtggggatgttaaattaatagtttttttaggttgaggtaggtttaggggtttgttttgtgtatatagattttattaatattttatgatttatttgggattatttgggtggaattgtttgaagaggagaaaaattttttttgttttttattaagatgttattagatgattttttggtagagttttttggttttttttttataataatgaaaaaattatatatatattttattttttttttaaagatattagatattgggatgttaaggtttagattggattgcgtgttaaattttaaaatttttagatagtttaatttgtataaagataaatagtttggatttattttaatgtatatttgattttaggaggtgatgattttatagtcggtagaaaatagtattatttaaaagaagtagttgacgttaaacgttattataggttaggattgtttggtgggtttatttaatgtttggagttgagaaatggaattaaattgtgaaggttttggtaatttggtagttagagaggtatttagaagggtgattttggaataagaaatgttgttgattgtttagtattttgtggttttgtgttggaaaaaaaaaaaaaaaaaaaaaaggaagttttttttgtatattatttatttttgttaaaaataattgaggatttaattttagaatggttcgttgtattttttggtattgaatatgaattagttgtgtagtttttttgggttgattatatagatttttattgtgatggttttaattgattttatgttaattttaagtatttggttaattttaatagtttttggttttttttttcgagagaggttgtggaagttttatttattaaggaggttatttttttagttgttttaggtgagtgaatagaagaggtgttagagaatatggaagggtagagtattttgtaggggtagattgaagaattgagttttttagtggtatttgttgagttgggaattggagtaggagggagtaggtttgagagtgtatttgttttttgagttttagttgttgttttggttattttgtttatttttatttttggttttcgtatagggggaagattattttattttttgatttggcggtttaggtttgttaaagtagttggggtggatttttttgtttttttttaatttggtttggggaagtaggggatattgttatagatagagtagtttggttaaaggagagtagagttagggatgttagttttggttttatttttttttagaaatagttttgaagtaggattataattatttttattatggagtaagatgtggtaatgattaaagaaagttaaagtttaaatattttttaataggttgtatttagttatttgttttgtttgttttttaattttttggtatataggatatatttggtgttattgtttttttattttatttttaagagtttagtttttagtattagagtttataatgatttaattattgttattattattattattattattattattattattatttttatagtattattatgatgaattaaatgattatagtatttgttatttattgagtttttattatgtgttagatattgggttaggtttaatgtagttttttgttgtatttttttattttcgaatatttttatatattttataagagagatattattattttttttattttatagatgtagaaattgatgtttaagagaaattaaatgatttttttaagttatataattagagagtggtagattagggttttagatttagaaaattttattgtagagattatgttgttattttttatagtttaagaaaggattttgttttttgaaggagttgaagagtagatggggcgaagaatgttgtttatttggagattttagaaaagatgttaaaaagtagaggggattggaggaaatatgtatttggtagtttgttaggtttgttatatatatttgggttttttttggttatttttaaaatgttatttttattaataaaattatttttgaagatgttattagtaagatatagtttaagtaaatttagattaatgacggattattttgttttaaataagatatttattagtgtatattaggaagagttgagaattgggaagagtttagtggtagatcgtagatttttgtttattaattgagtgattttgggtaagttattttatttttttaagttcgtttttttatttgaaaaataagaattataattttttttttgtttatattatagagtaattatgaggattaaataggattatgtatgtgaaaatgttttttttattttaaagttttatataaatatgtagaatgtgaggtaaagattgagtaacgaattttaatgtcgtgtaaatattatttttaggaaattgttttttgttttagagatgttgaaaggtatattatttttttttttaaagaaaggtttgatggtttagttaaggttattagattttgttatttttttaagttatattatttgtatatgatttatatgtgtttgtataatgaatttaaaagatttattgtaagtatataagagtaaaataaaatgaatgaatatgagtgattttttgttacggtatttaaattatatatttagggtataatattttgaaatatgaaatagattaaaatgtaaattattgtaaatagatgagaagataggttttagagtttagaggtaagaatgaaattttatttggttttagaatttggatataaagaattatatttttttataggttattttatttaaatgatgtttatgtttgaatttttttttatatatttttaatttatttttttttgtagataaaaatatattttttgaattattttttagtttattatgaaatgttttaggtgatagaaaatttattattttttattttttaatggttttggttaagtttgattgtttaaaaggttttattttatattgaattgttaaagttttttttggttaatagagtaagtttaaggttttttttatttttaagtatttgaaaatagttattatgtttttgaatcgttttttttttaggttaaaaatttttagttttttaaattatgttataaatttatgtattataatttttagtaggttgtttatttaaatgtttttttaattgtttaagaaaagtattgatttgaattttaattttagttttgttatttattggttgtgtgttattggggtagttttttagttttagtttatttatttgagaaattatggagtttaattagtttattaataaggtatttttttatttaaaattttattattttattttaaaattatgatttttaatttatttttgtaatagagtttttggtttgagttaataatattgagttatatttgatttttgttaataatttgttttttttttttttaggtagttttatatttttttggtaaataaaaattagagaaagaagtttggcggagtgatgggtattatgatttttgtatttttagttgatttatagtgttattaagggattaaattgttagtatttatgttgagaaatagtttttgtagagatatggagagggagaagagaatatgagaaaaggtattagaaatgtatttatttttattgattagtatttattttagtgaggaaataatagattgtgggttttagaagtttttaaaagtttaagtatttttatattaggtattaatatatatttatatataaattttaaattattgtttttgttgttgtattgttttttattttattatatttgtatgtagtttgttttttgtggttagttatttttttatgggtgattttatagaattatttaattttttgtttggtgaggtttatatatttatttttttgttgttatgtatttataatttgggagtgatttggggttttataattttttatttggttttttaggtttttttttggtgataatttaaaggttaatgtatttttttttaaggatgtgtaaattaaaatatgtttttgtgatttaagtttagtaaaaagttagatatttttaaaataattttattaggggattaaaataataatttatattatattttatgggtattagttggtattaaattgatttatattttttttttttttatatttagttgtagttttgttttttgtttaagtttgtttttttgtttttagatggttatgtttatttgtatttaaaattttacgtgaatattttaaatattgtatggttagttttattttttattattatattttttaatatatgtttgtttattttattttattattattttttttagacgaagttttgttttgttatttaggttggagtgtattggtgcgattttagtttattgtaattttgttttttaggtttaagagattttatttttttagttttttgaatagttgggattataggtgtgtgttattatgttcggttaatttttgtatttttagtatagatggggtttttttatgttggttaggttggttttgaatttttgattttaggtgattcgtttgttttagttttttaaaattatgggattataggtgtgagttattatgtttagtttgtttattttttaaattaaattattataatttaaggtttagagtaataagggtttaaagttaagtttatttttttttgagggttattgttgtgttgttttatgagtgtattagaataaagttatttgtttttttatttttgtttttttgttatgttgtttttgtttttgtttttgtggttgatgttgtttgtgaggttattaggttagatagagtaagtgatggtgatgttttttttatattttgagaggagatagggttttttttatgtttggtttgattttataggggaagaaagattttttttttattttttttggtttttagattggagtttgtgaattgaattgataaaagatagattaataggagaaaaagtataataattttatttgatgttaatatttttgtgtggtataagggttttttagaaagataggaagattttaaagcggcggttagatttagaggattatatattattttaataaagagtaattaattgtggagatgttataagataaaggaaaaagggatttgagttaggagtagtaaattgtgggaaagtgattgggatatatatggggaaaattaatgaaaggtaaaggttaagtaaggtttgttttgattttttgtttttagtgataagaatatttttttattttaggtataggaatggtattttttttatgggaaatttatgttttgtttttaggtaaaaatggggagggtaggaagttttttttatatttgtaattttttagttatttttaggttagaataattaatatattaaagtggtgaattttggggtgttatgttttggttttttttaattttaagtttagttgtgtatttttgaagttggataggtttgtgatgttgatttttatttagaatttgattatttttttgtattgttttttgttgttgttgttgttgtttttttttttttttttg

SEQ ID NO: 107 - DNA, 6725 bp, Artificial Sequence
  chemically treated genomic DNA (Homo sapiens)
tttttttttttttttatttttttttatttttttgagatattcgttatagtttatgttttattttgttttgtttttgttttttttgagttttttttttcgaaatgttttttttgatattaatgttattttgttttttataatagtgttttttattaagtattttttattgattgtgtaagagtaatataaagtattaaggagttgagtagaaaatttgtaagtttgggtacgttttattataggtaattgattaagattggttattttattgtgggttttaaatattaatatttataggtttttttttttggtttagatatttattttagagaggattttattggtttttgtttgggaggtggttttggtagttagatattaaggagtttagtttaggtaggttgagagttgggtgattggtttattgtttagaatgtagatttgtatttaatgtttttatttttattatggtattattttttgtttttagttatgttttgagttttaagtttagagtttttggtttattttttttaaagagtgatttttttattttttttttagggtgggaaaaggtagtaatttggttttttggtttgggggagaaaatttggggtttaattgttttatatatagatttttaatttgtttttttgtttatagtattgtcgtgtagttttgtttttagaattattgagtttttttttaggatttagggtataaattagtttgttttgtattgatttttttttttttaggtatttaggtgttagttttttttattattttaagttagttattatttaattattttgtattataaatttttattgatattttttatttattattattttttttgttttttttttgtttttattggtttatatttttttaaattttttttgttgatattttaatggaatttggaaagtgaatagagagaaatttgtgtgtttattttattatttttagtagaaggtttagtggtttatgattgtaattatagtattttgggaggttaagataggaggattgtttgagtttaggagtttaagattagttttggtaatataacgagattttgtttttataaaaaatgaaaaattagttgtgtgtggtggtatacgtttgtaggtgggaggattatttgagtttgggaaattaaagttgaaaaaatataattgtattgttttattttagtttggataatagagtgagattttgtgatatagtttggttatttgtgtttatttaaattttttgttgaattataatttttagtgttggaggtggggtttggtgggaggtgtttgggttatgggcgtagatttttcgtggtttggtgttgttttggtgatagtgagtgagtttttacgagatttggttgttgtaaagtgtggttttcgttaattttcggtaatttttttgtttttgttttattacgtgaaatatttgttttttttttatttttttttataattgtaagttttttgaggtttttttagaagtagatgttggtgttatgttttttgaatagtttgtagaattatgagttaattaaatttttttttttataaattatttagtgttaggtatttttttataataatataagaatggtttaatagagttgcgtgtagtagtttttgtttgtaatttaagtattttgggaggttgaggtaggaggattgtttaagtttaagagtttaagattagtttgggtaatatagtaagattgtgtttttattaaaaatttaaaaagttggttaggtgtggtggtatatatttgtggttttagttattcgtttgtggttttagttatttggaaggttgaggtaggaggattgtttgagtttaggagtttacgttgtagtgagttaagattgtgtttttgtattttagtttgggtaatagagtaagattttgtttttaaaataataaaataaaataaaattggtttaatattttatttaaaaataaaataaaatagagggttatagtatattttttagaatattttaaattatggtaaatttttatttttttaggatggttttagttttggggaatagttaaaagtgtgagaaatttttggttaaatttttttttttaggtttgaagtttttaatatttattataaataattatttttttttattttgagaaataaataagttgagtaaattatgattattgtttattgtaatataataaagtaatttagggtttgtaagtaatttttttaaaaagataaaatgtatatattgtattaaaaagaatatgtagtatatataaaatttttgaggaagaaaaattatttttgtttttaaattatgtttatttgttattttatttttaaatagattgtttattaaatttattttaaatggaatgataggattataaatggatgttataattgtttttaattttttttttaggggagataattaaggggattaaaaatattttttttttttgtagtagttatatgataatatgttattatttgggtttaggttggtaagtaaatatttgtttgttttatttttaagaaagtataaggttataattatttaaatatttgaaaataaaaattaattttattagtataaggttgaaattagtatatgtaataattggttgttttttagtattgagttgggaacggtataaaggggattaaagattaatttttttttttttttttttttttttttttttatttttgagatatagttttattttagttgtttaggttgtagtgtagtggtacgattttagttaattgtagttttaattttttgggtttaggtgattttttgatttttaatttttcgagtagttgggattatttttttatttttaaatttttttttatttttagtaaatatagggttttgttatgttgtttaggttggtttttaatttttggttttaagtagtttttttgtttcggttttttatagtgttggaaatataggtatgagttattgcgtttagttaagattaatttttttaattggtttttgtttttttgggttttgaaaatttgttttattatttattattattattattattattattatttgagatagagttttatttttttttttaggttggagtgtaatggtataatttcggtttattgtaattttcgttttttcggtttaagcgatttttttgttttagtattttaggtagttgggattataggtatttattattatatttaattaatttttttatttttcgtagagacggggttttattatgttggttaggttggtttcgaatttttgattttaggtgattagtttgttttgggtttttaaagtgttgggattataggtatgagttatcgtagttggttatttttttttttttttttttttttttttttttttttgagatagagttttattttgttgtttaggttggagtgtagtggtgtgattttagtttattataattttcgtttttcgggtttaagtaatttttttgttttagttttttaagtagttggaattataggcgtattattacgtttagttaattttgtatttttagtagagacggagttttattatgttggttaggttggttttgaacgtttgattttaggtgatttatttattttagttttttaaagtgttgggattataggtatgagttattgtatttggttttatttattattgaagaattaaaattaggtttagtttgaaaaatgagattatttttgatttttgaatagggtttttgaattgttatttaaaattaaatttggtaatttttagaggttattgatgaaaaataagggtaattataaagtgatgatattttgtgtggtttagaatttgtttttttaggtagatatagaagtgtagttttttttgagttttggtagtattgttttaaaagttgtgtatagtttttttgagattgttatttttaaaggtagtatttagttggatatatgtttgggtaggttttatttttaaaatgttgttgttttttaatgattttttatgttttaatatggaaaggggaggtaaagtattgtgaaaagtagttggtaaagtaggtcggatgtggtggtttatatttgtaattttagtattttggaaggtcgaggcgggcggattacgaggttaagagatttagattattttggttatatggtgaaattttgtttttattaaaaatataaaaattagttgggtatggtggtatatgtttgtagttttagttatttgggaggttgaggtaggagaattgtttgaattcgggaggtagaggttgtaatgaattgagattgcgttattgtattttagtttggtgatagagtaagattttattttaaaaaaaaaaaaaaaaaggtagttggtaaagttgtttatatgaattttatttataatagtaaaatattgatttataataataaaaaatttgttatagtaataaaaagagtttagagtaagaaattagttgagtaacgtggtgttatattatatatttattaagataataggtatatgtgttatgtttattttgtggaaaagatatgtaaaataattttaagtaaaaaagataaatataaaaaagtgaatgtatataaaataattttataaaattgaatgttatttaaaaattatagtttattttaagttgtataaaatagttatttttttttttataattgtttaaatttataattaaatagaagaaagtttttgttttggaagtagtgttatgttttaatttttttagagttagtattttaaataattttattttattatttttttgtagattaatttttaggatattagtatatttttttttaagtattaaaaaaatttttttagagttagtggattaatagatagtttttgttttttatataattgaaagggtggagtttttaaattataaggggaagaaggaagttaaaagatgttaaatattggggttagtttattttggttagtttagtattttgatttagtagttaatatgaaggtttttattgttttggggtttgtttttttttttgttacggtttagggtaaggtttttgaaaggtgtgagttggttagaattttgaaaagattgggaatggatggttataggggaattagtttagtaaattgtaagtttattttttataattttagagaattagttacgtatggaatagatattaggagagaaggaagaagaagaaggggttttgagtgaatagatgttttatttttttgtgggtttgtatatttataatggttaaaaatattagtttggttttttataattagagatattcgataaaggaatacgggtatggtaggggaaaattttattttaagtaaaataggatttgttgtattgttttagtgttaggaagtttgttgggtgtttgagatttaatggtatatgtaagttgattgaaagatatatttgaggatttggtagagtttttttaagtttttggtatgtgattttagttattttttattttgaatttgggttttgagagtttagagtgatgtagtattttttttgtttttaagttttttgtcgtgatgtgggatttttatttttatttttattttattttattttatttttaaagatagttttattgtgtggtttaggttggagtgtagtggtatgattttagtttattgtaatttttgttttttgggtttaagtgattttcgtgttttagttttttgagtagttgtgattataggtgtgtattattatatttagttaattttttgtatttttagtatagatggggttttattatgttggttaagttggttttgaatttttggttttaaatgatttgtttattttagttttttaaagtggtaggattataggtgtgaattattgtatttagtcgatatgggatttttaatagtgatgtttttaaagaatatattgaattttttatataagagtagtaggaatttagttttttttagttattttttgtataggattttagaaatttagtatgaaatgttttattatttttatttattttatttgattaattattttttatttttttttatataatttaagatgtgttatgaggaaaagttattttatagtttagtatatagttgtcgatgtaataatttttgtagtttttagattgaatttagatatttttttttaatagttatttttgaatgaatgagtgaagggatgaaattacggaatagttttgtttttaagattttaatttgatatttaaatttatttttagatattataagaaaatttttattagaaaatttttatgtttttttgattaaaaaaagtatttttttattagtttatgtatttgttatgaatttataaaatttatttaatagttttgttgatttttttgtttttggttgaatgttgtttgagggatgggagtacgggaagggtaaaagtaatggaataaatatgtattttaatattttaaaagtatgttatattgttcgttggtgttataagatgatttgtattataaaaggatttttttataagttttttattttaatattaaagtgttaagatattttataagtaaatttttatatttataaaataaattagtaaaatagaagtagttaagtagaattgattttgttatagagtataagttatttagtgttgttgtttattattaaaaataagttttttttagg

SEQ ID NO: 108 - DNA, 6725 bp, Artificial Sequence
  chemically treated genomic DNA (Homo sapiens)
tttgaaaagaatttatttttagtaataaatagtaatattaagtgatttatattttatagtaaaattagttttatttagttatttttattttattgatttgttttataagtataaagatttatttataaaatattttagtattttagtgttaagataagggatttgtaagagaatttttttgtaatgtaaattattttgtaatattaacgaataatataatatatttttaaaatattaaaatatatgtttgttttattgtttttatttttttcgtgtttttattttttaggtaatatttagttaagaatagaaaaattaatagagttgttgagtagattttgtaaatttatagtagatatataggttgatggaaaaatgttttttttaattagaaaaatataaggattttttgatagaaatttttttataatatttaaaggtgaatttggatattaagttagaattttgaaaataagattatttcgtgattttatttttttatttatttatttaaaaatagttattgaggggaaatgtttgaatttaatttgaaaattatagagattattatatcgataattatgtattaaattataaaataatttttttttatggtatattttgaattgtgtgggagaaaatgaaagatagttaattaagtagagtagataaaaataataaaatattttatgttgagtttttgggattttatataaagagtgattgaagggaattaggtttttattgtttttgtgtagggaatttaatatattttttaaaaatattattgttaaaaattttatgtcggttgggtgtagtggtttatatttgtaattttattattttgggaggttgaggtgggtagattatttgaggttaggagtttaagattagtttggttaatatggtgaaattttatttgtattgaaaatataaaaaattagttgggtgtggtggtatatatttgtagttatagttatttagaaggttgaagtacgagaattatttgagtttagaaggtagaggttgtagtgagttgagattatgttattgtattttagtttgggttatatagtgagattgtttttaaaaataaaataaaataaaataaaaataaaaataaaaattttatattacggtaggggatttgaagataagaaaaatattgtattattttaggtttttagagtttaagtttaaaatgggaaataattggagttatatattaaggatttgagagagttttgttaggtttttaaatgtattttttagttagtttatatgtgttattgaattttaggtatttagtaaattttttagtattagaatagtataataggttttgttttatttagaatggaatttttttttgttatgttcgtatttttttatcgggtatttttggttataaagaattaaattgatgtttttagttattgtaagtatataaatttataaagaaataaaatatttatttatttaaagttttttttttttttttttttttttttagtgtttgttttatacgtagttaattttttggaattatggagagtagatttatagtttgttaggttgatttttttgtagttatttatttttaatttttttagagttttggttaatttatattttttaaagattttgttttggatcgtaatagaaaggaggataagttttagaataatgagagtttttatgttgattgttaggttagagtgttaggttgattagggtgagttggttttagtatttaatattttttaattttttttttttttttgtggtttgggggttttatttttttagttgtgtggaaaataggaattgtttattgatttattgattttaaagagatttttttaatgtttgaagagagatatgttgatgttttaagaattagtttataggaaaataatgaaatggaattgtttaaagtattggttttggaagaattggggtatagtattatttttaagataggaatttttttttgtttgattatgaatttgagtaattataaagaaaaaaatgattattttgtgtagtttaaaatgagttgtgatttttgagtaatatttaattttgtgaaattgttttgtatgtatttatttttttatatttattttttttatttaaaattattttatatattttttttataaaatggatatgatatatgtgtttgttgttttaatgggtgtatagtgtgatattacgttgtttagttagttttttattttagattttttttgttattatagtaaattttttattattataaattagtgttttattattataaataaggtttatgtgaataattttattaattatttttttttttttttttttgagatggagttttattttgttattaggttggagtgtagtggcgtaattttagtttattgtaatttttgtttttcgggtttaagtaatttttttgttttagttttttaggtagttgggattataggtatgtattattatgtttagttaatttttgtatttttagtagagatagggttttattatgtggttaggatggtttggattttttgatttcgtgattcgttcgtttcggttttttaaagtgttgggattataggtgtgagttattatattcggtttattttattaattattttttataatattttgttttttttttttatattagaatataaggggttattagaaagtaatagtattttaaaaataaaatttatttaaatatatatttaattaaatgttatttttgaaaatagtaattttaggagggttgtgtatagtttttaaaataatgttattagaatttaaaaagaattgtatttttgtatttgtttaagaggatagattttgagttatataaagtgttattattttgtagttatttttattttttattagtggtttttaaagattattagatttggttttaaatgatagtttaaggattttgtttaaaaattaagaataattttattttttaggttaggtttaattttgattttttaataataaatagggttaggtgtagtggtttatgtttgtaattttagtattttgggaggttgaggtgggtggattatttgaggttaggcgtttaagattagtttggttaatatggtgaaatttcgtttttattaaaaatataaaattagttgggcgtggtggtgcgtttataattttagttatttgggaggttgaggtaggagaattatttgaattcgggaggcggaggttgtggtgaattgagattatattattgtattttagtttgggtaatagagtgagattttgttttaaaaaaaaaaaaaaaaaaaagaaagaaaaaaaaaatggttagttgcggtggtttatgtttgtaattttagtattttgaaagtttaaggtaggttgattatttgaggttaggagttcgagattagtttggttagtatggtgaaatttcgtttttacgaaaaatagaaaaattagttgggtgtggtggtgggtgtttataattttagttatttgggatgttgaggtaggagaatcgtttgaatcgaggaggcggaggttgtagtgagtcgagattgtgttattgtattttagtttgggaaagagagtgagattttgttttaaataataataataataataataataataaatagtgagatagatttttaggatttaaagagatagaaattaattaaaagagttagttttggttgggcgtagtggtttatgtttgtatttttagtattatgggaggtcgaggtaggaggattgtttgagattaggagttggagattagtttgggtaatatggtaaaattttatatttattaaaaataaaaaaaaatttaaaaatgaaaaagtagttttagttattcgggaggttgagggttagaggattatttgaatttaggaggttgaggttgtagttagttgagatcgtattattgtattgtagtttgggtaattagagtgagattgtgttttaaaaataaaaaaaagaaagaaagaaggaaaaaaagagttagtttttggttttttttatgtcgtttttaatttaatattaaagaatagttagttattatatatgttggttttagttttatgttgataagattaatttttgtttttaaatgtttaaatagttatgattttatatttttttggaagtggaataagtaaatatttgtttgttaatttgaatttaagtgatagtatgttattatgtgattattgtaaagggaagaagtgtttttgatttttttaattattttttttggggaagaagttaagggtagttataatatttatttataattttgttattttatttgaggtaggtttaatgagtaatttatttaaaaataaaatagtaagtaagtatgatttgagggtagagataattttttttttttagaaattttgtatgtattgtatgttttttttgatgtaatgtatgtattttatttttttaggaaagttgtttatagattttagattattttgttgtattataatgggtaatagttatgatttatttaatttatttgttttttaagatagagaaaaataattatttatggtgagtgttgggggttttaggtttaggaaagggaatttgattaagggttttttatatttttgattattttttaaaattaaaattattttgaaaagatggagatttgttataatttaagatattttaaagaatgtgttatagttttttgttttgttttgtttttagatagggtgttaggttagttttgttttgttttgttgttttggagatagggttttgttttgttgtttaggttagagtgtaagggtataattttggtttattgtagcgtgaatttttgggtttaagtaatttttttgttttagttttttaagtagttgggattataggcgagtagttgggattataggtgtgtgttattatatttggttaattttttaaatttttagtagaaatatagttttgttgtgttgtttaggttggttttggatttttggatttaagtaatttttttgttttagttttttaaaatgtttggattataagtaggagttattgtacgtagttttgttaggttatttttatgttgttataaagaaatatttgatattgggtaatttataagaaaagagatttaattggtttatggttttgtaggttgtttaggaagtatggtattagtatttgtttttggagaggttttagggagtttataattatggaggaaggtgaaggaggaataggtattttacgtggtggagtaggagtaagagagttgtcgggggttggcgggggttatattttataataattagatttcgtgagaatttatttattattattaggatagtattaagttacgagggatttgcgtttatgatttaaatattttttattaggttttatttttaatattggggattataatttaataggagatttggatgggtataaataattaaattatattatagggttttattttgttgtttagattggagtgaagtagtgtaattatgtttttttagttttgattttttaggtttaggtgatttttttatttataggcgtgtattattatatatagttaattttttattttttgtagagatagagtttcgttatgttgttaaggttggttttgaatttttgggtttaagtaatttttttgttttggttttttaaagtgttgtgattataattataagttattaggttttttgttgaaagtggtgggatgggtatataggtttttttttgtttattttttaaattttattaaagtattaataaaaggagtttgaaaaggtataaattaataagggtaaaggaaaagtagaagagatgataatagatgagaaatgttaataaaagtttataatatagagtggttgagtagtaattaatttaggataatggagaaagttgatatttgagtgtttggaaaaagggaaattaatataaagtaaattagtttgtgttttagattttggaaaaaaatttagtaattttgaaggtaggattgtacggtagtgttataaataggaagataggttggaaatttgtatatggaatagttaagttttagatttttttttttagattaggaaattaggttgttgtttttttttattttagaagaaggatgagaagattattttttggagaggatgaattaaagattttggatttaggatttaaggtatgattaaagataggggataatgttataatgaaaataggggtattaaatgtaaatttgtattttgagtagtaagttagttatttagtttttaatttgtttgaattgagttttttgatgtttggttgttaaaattattttttaggtaggagttaataggattttttttggagtaaatgtttgaattaggagaaaagatttatagatattaatatttggggtttatagtgaaatggttagttttgattaattgtttgtggtgagacgtatttaggtttatagattttttgtttagttttttggtgttttgtattatttttatataattagtggaggatatttgatgaaagatattattgtgaaagatagagtgatattaatattaaaagaaatatttcgagaagaagaatttaaaggaaatagaggtaaaataaaataagatataagttataacgaatattttagggagataagagaaaataagagaaagaaaggg

SEQ ID NO: 109 - DNA, 13125 bp, Artificial Sequence
  chemically treated genomic DNA (Homo sapiens)
  unsure (1892, 2056)
ataaaatgtttttatattgtaattgggttatggtttaaaatttatttgaaaattagatattggaattaataatgttttttttttttttttttagagaaataatagtggagagaaggttttacgatatttttagaagttattttatttataatgaagttgaattgtaatataaatgagggatttaggaatagaatatgtgtcggtgtagaagaggggattagtgggggatagtaggggaggataggaggagaaattggagggggaagatttttttttttttttttattaatatagttttagttttgggttatagtttataataattaggttatgtgtatatagttttttgtggttttagagttagaagtgattggagtttagggtttgatttaggttaaatagatttatattagttagatgtgttaattagaatggtagttaaaaaaattgttggttattaagtatgttgttattagtgtattttttttttggaagtaaatttgtaagggaagttggagtgtaattagaaaattgtgttgagttttatttagattagggattaattgttataggattagataggataattttagattttattagttttttttttggtattttgtataattaaggtttgggagttgttttttttatatttttttttttgggttttttggttttttttatttattattattattttttgttagatatattgttgttttaattatgatgatgtttttaattagattagagttaaaattggtagtttgggagttattttggtttttttttatttgtttgtttgttggtttgttttaggttgatgtagtattgtttttatttaatatgtgcggattttgtagtataattagtgggaaataatttattttttatgtttttagggattattttaatttaatgtttttaaatttttaaatatgttttaattatatttttagttatagatagtattattattttgtgtggaggaggtagaagtggtagaagaaagagtggaattagtttattttattttataaatttttaaaatttaaaaatatttgttgttttaaattttttttagaagtagtaggaatataaagtagaataaaatatatgaaaaaatataaagagttatttattattttttatttttaattgaaatatttttttttttagagaaaatgatgttagttagatgttagaaagaaagatgaatatattaatttatatttatgtgtaaatgattaggtaatatttttagttatattttgagagttttttttttttgagagagggtatatagtgatatatatgtatttttagtagaattttaggtagtgtaagtagttattttatagagtaggaaaatttaaagagtattgtgggaaaggttttaggtttaggttggttttttgttttggagtttagtttttttttgttatttatatttttttttttttttggatattaatttaaaagatttgtaagtttttaaggtttattataaaaatttttattttagtattattaggatttgtagttgtgggagtaagagggagattaggttgttaaggggagagtgagggtaatttttggtatatttgtatattagaagttttttttattagtttaatttaatttttgatttatttttgttgtttatattttttatttttttttaaatgtttaattttttttttttttttttttttgtgattatgagtttttggttattttgttattggttgattatgataggtgtgtttttttattttagggtttgttttagaatgttttttttttagattgttatagcgattttttgttaacgtatttaaatttttgtttagtgttatttttttagagagttttttttgatttattanaaatagtatttttttttatttattatttttttattttgttttatttttttttattgtatttattattatttggcgtattatgtttttgttgtttaatttttatttgtttgttaatatcggaatgttagttgtatttgggagggatttttgtttggttggtttanagttagatttttagtacgaggtttgtgttgggtataagtggtttttataatatttgttagatgatgatttttattttataaatggtatttagtttatagttgagtagttggtaatattggtgtttttatatgttagtttttttttttttttttttttagaattgtatatatttttttgggatgaagaggggaaggggttatttttttagtattgaagtataataatgtaatattttgtttttgttttagaggtgttgtagtagtattatttgtatattttataagattgtttttgttttattgttttagtaattgggagaaaataggttaatgaattaattattttttgattgtttattatgtttagttattgtattaggtgtttatatattttattattttttttttttttatagttattttaatagttataaagatgtttttttttttattaaataaggagatggaagattaaaaagagtaagttatttgttaaagttatcgagttgtaaagtagtattttgtatttttagtttgtgtttttttattatgtttttattttttaaagtgtgggtgatgatttaggtggttacggttatggtgtttaattgtatagatatatatagtaagaaagcgttttgttataatttttatttaattttttgttgtaatatggagaataatttagttaggtgttagtatttttttaatatttttttaatatttggttaatttttgtttttaattaagaaaggagagttttggatttagagttttgagtaaattataatagtatgtagtaggaatttgattatattttatttttattgtgtatatttttagggatattttttattaataagtgatattagtgtttttatttatatagtaatatagaattgtatttaaaaataaatttaagtaaaagaaataaattgtataaaagaaaattattatatatataaaagtaataatggtttaaagaaaggaaaattaaatataaattagatgaggttggaatttaacggatgatttttagaaaatagtgttttttattatattttttgttttttattttagttatgggttttggtgttggttttattttttgaatagtaattgaatattttaattaaaatattatttggaaatattttatttagttattggtgaatgtagttagttggaaatattttatttaattattggtgaatgtaattttttagtgattttgttatagattttaaatattgcgggttagacggtatttttattttgtattgattagattgatatgttggatggaattttttagtttttggttgtttagtatgttttttatgttagggtgttaggaaagatataagagtaaagagtatatgattaataagttatggtagttaatatttaagatattgggttattttggaaattttaagaatatttaggtgattatttatttatttatttatttatttatttatttatttatttattatttatattttattaataggtattttagtattaaagttatgttgattaatttttatttattttttttttttaaagttcgaattttttagttttttatgatattatgtttgtatattttgttttttttttatttttttttttttttttgggatagaagttatatttagtatgtttgtgagaaacggttgtaaataggttgttttaaaaaaaaaataaaaaaataaaaataaaaaatatattttttagtttttttaaatataaataaaggtaataaaaatttttaatgttataggtattttaaaagatattattgttacgaggtaattttgtttgtgtgttttttaaggaattgaaaagtatattatagttattgtaattttgttgagtagagatagtattttttttttattttttgttattattgatattatttgtttagtatattaaggaaagaaattggtatttaatataatatatttgtattttttttattttttatgagtattataaagttagtatttttttatttttggttttgttagagtagaatttaaggtttgaataatagtaggtttaagttttgtatttttgatgtattttttaagtgaaggtggtaaatattgatattggtaaatattagtaaattcgtttttttaaagttataaggttaaagaaaagataggtttcgtttttttaggcggggtatttatagtttcgtatttgtttattgtggttattttagtttttgagaatttggttatattatatatagtatataaggtagaggtttgattagtgtaattttaataagagaaaagatttttatttcgaaaatggaaatttattttatttttatgtatagatagggtgagggtgaggagtgggtagtgggtgtgtacgtggtgggtggtgtaggttgagagcgttttttttttttacggttgtagtaggagtttagcgggcgttttagttttttggttcgcggttttgtttcgattattgttcgtatatttcgtttttttagttttcgggtcgcgggcgagatgatttgttgtagatgatattagtttcgggttaacggttggaagagcggaggtagttatcgcgtgaggatgtgtcgggtggtttttttttttttttttttttttttttttcggttttttgtttagtttttatataaaagcggcgtcgttttttcgtttttttttatttttcgttttttttcgtcgcgtatttttcgcggcgttgggagagggcggagggggaggcggcgcgcggcgttagaggaggggggacgtagggggcggagcggagatagtattttcggagataatttttttttttgtcgtagaggagaggagcggtcggagcgagatatttcgtcgaggtatagtagtcggtaggatggcgatcgtggtggtggaagttatcgagtcggagtcgttcggtagtatcgttaattcggcggcgtttatttcgtttagtttgtcgtatcgtttttttgatagtaagttttatttgttggtggtcgtcggcgagatcgtgatcgaggagtatttgcggcgtgttatcggtaatatcgagttcggtaagtggtttcgcgtttttagagacgcgcgttgggagacgcgtaaatacgattttatttagggcgcgacggttattgcgtttttttcgcgcgtttcgtatttatgttttttttcgttattttttatatttggtttagattttttttgggttaattaagaataattcgaattattagatatgagatttagagggagagtttttaataattttgagggatttgttattacgttgagttcgtagtttgtgttgagttggttatcgtttttttcgttaagtgaaatgtaggtgttaggggagtagaggttataataaagtcgtaatcgtaggaggtagaagggtgggggagatttgatgtaattattttttttagtttttttttggttttaggaaaaggttgggatttttattatcgtagatttggggtcgaagtttatgtgttagggttcgcgtgggatttatttttattacggttattttagtttttgagaaacgttttttttgattttaaatttttcgattttttttttttttagaatgattaggttagttttagggttacgttcgtttttttcgttttttttttttcggggagatgttgggatgtagaatcgtttgcgtttcgttattagatagagttcgtttcgttatcgtttttggggttttggttgtagtttttagaaaggataatgggattttaagttgcggggtggggttgttgtttttagaagttttagtttcgggagtggtagtttgaagggggtcggtgagggagacgttagcgggtagggttagtttttcgttcggtgttcgtattagtggcgcgttttgcggaggtcgaatagcggtacgtcggggattttgggcggggtcgtgagggttcggcgggtatagtttcgggcgtatagagagatcgtttttagttttattcgagttgtcgtagtgttttcggatcgttcgttatatttgtttttttatattgcggcgttttcgtcgggtacggttggttgggtttgcgtttcgttcgggtttcgggttggcgggggtcgcgcgtttttattttttagtttgtttggttttgttgttttgggagtttttgggtgggtagttttggtttttgtttttttttttatttttggcgtttcggtttttttttcgtttttgatagaggtcgtcgggttttttcgtagttttagttcgcgttttatttttttggggtggtgttgaagcgttttttcgggagatatcggttggtgggcgtggtgtagttcgtattgcggtttttacggtagttcgaggcggataaagggcgtttacgtagttttcgttttttattttttttttttaataaaagacgaaagaaaaattttgttttagatgaaaaaataaatgtttgttatttgtttttgtagttggaaacggttatttgtttttagaataaaaggttgtagggtggggattggagttgtagatttggtttttttgtttaattttaaagtatttgatttttttttttagtttaaaaaaaaaaaaagaaaaaaaatgtgagtagaaagttatagtattttattttaaaaaatttaagaataagagatattttagtagtgaaatgttttatttgagtattttaataattttttatttttagattatataggtttttggtttaatttgttttaatttagtttatttgtataatttttttttggaaaaattttatatatattgattttgggtgtggttattgtgggaattaatgattttggatttttttttttaaaaaattatttgtaagtagtatttttgggaaataggaatatattaggaggtgtttttttatttataaaatttttataattattcgatgtggtggtgttaggagagggattattaatttcgttttagagttgggggtttagagaggtaggaagggtaagagaatcggtttaaggttatagtatttataagtgatagaagtattagtattgtagcgttattcgttttttgattttgttatgatgttagtgtagggttggttaatattttatgatgggaggaaggttttagtataatagtttttagggtttgtttttgtatggttatttatttgtgggtagcgttttatgttgggagatggtttagtaattattttcggatcgtaattatttttttgttttgttatttatttgattatttttttagcgttttattttttagagggtttatataagttgtatttatttatggagaaaatagacgtatttacgtattgttatgaagaagggttttttgtttttattcgtttttatattattagtatttagtgataaaatttagatttgtttttttgatattaattttttaaaaaattcggttgaagtattatatagagaggaaagggtataaattaaagatgagtagtttaacgaatttttataaaacggatacgtttgggttatttagattaagaaatagatattattggaattttagaagtttttttgtgttttttttgtaatagatattatggttttttgattttttaattttttaatttggttaggtttttgtatggaatttcgaaatgattgtattgattttattaagaattaattaagtgagtgagtagagtcgtttttttatatatcgtagtagatgttgttttttttttgaagatggtttttttgggttttggggttttggttgtagtttaagatgtaggtttttttagcgttaagtgaaaattttgtttttatagttttttagatagtttgagatgatttagtaatagagtaggttggttttgtttttttgtgtacgataagttgttgttttagtcgttaggttttagttgggttttttttagaggttattgttgttgttgtttggtgtttttgggttttgttgtgtgaagtaagatggagttgttttaggggggttagttttgatgattgtgtgttgtaggttgggaaggtagtttcgtatttgttattttttttttttatttttttttttgttttaattgagattttgggtttggagattttggcgatttggatttttgttattcgattattgagggttttttgggaagtttagaaaataatttataaatttgtagagatatggtggtaatgtagtaaattaataggtttggaacgttttaatgtggatgtttcgtaaatgttttttgaaattagggaagagagatggttttttttgtttttttaattatattcggaaagtataatgaaagttttggatatgttttttttagagtttggaataatagtgttttttcggattaggttagttttatttatttagttatgtaggattttattttaaatcgttttcgttattattaattattattttttggtatttttttttttttttttttaattagtttttagtatggatttagttagtggtttttatttttagtaaaattttgttttttggttttattttaatatatagaggatatatattcgtgttttgtaaattgaattttagagttttgtgaacgtttttattgttttattttttttttaaggaattaaaatatataaagaatattaagtgtttgttggatgtttttaattatcgttagattataattttttttttagttaatattgggaattagtaagatttgttggtgaaaagatagatgaatgtaatatttattgttttgtatttttagataaaagtttagttgattatattgttatattttgatgttatttaattgaatgttttttagtttaagatggtaagagaatttaaaatttaggaaagatttggggtttagtttttttttttttttaataggggaaataagaaattaatattatatgtggtgagaattaaatgttagagagttttaaatttattatatttgtttatattttttaaagtcgaagatagatggatttttgtttgtattgtttaattggtattatttacgatagttttgtgatttatgttgaaatataaggtagtttttaaatttaaggttattaaattgtttattttttttaagggtttattttaaaaaaataagttataattttttagataagtaaataattatgttattttttatttgtttgtgttgtaagatgttattttagatttaaattatttattattaatgttttgaaattatgagttttgtatgtaagatattatcgttattatatatatatgttatgaatattaagttgttggttttaaaaaaagaaaaaaagtaaattaaagatgagtttaagggaaaaaataagaatttttttttttgagaaataaagtatttttaaatgtagtattttttttagtttatttatttagtttatgattttaatttgattttagattattttttagtatagttttataaatataattttatgattttaggttaatgatttaggtatttggaaaaaatatttaaaagtttgttttttagagggagtaattaaagtttataaaggaaaattaatttgttaaaggtttaaataattgttagatagaatttatgtgttattaatatataatgtatggttattttattttgttttttttaatttattgttatttttagaaatatgaattttagtttttaaatgggaggtgtttttttaaattgttggttttattaaataattttgtaaaatgtttatatgattggaaaatttggaataatttagtttgtatatattaagagtatttgatttttttttattttttattttgatttgttttttaatgatttttttttgtttttttgttttataatttattttttttttttttttttatttgtgtatattatgtgtatgttagttttttttgtgtgtattgttattatttggggttagagaattgagaaggaaagattttttgttgttttttggttttaaggagtttatttttagggttgggtaatagttatagagtaggtttagattgtttttagagatgacggatgttttttggttttagatattgaaagaatggggtttattgtttttaattgtttggagttattttgtttttatttgggtaagtttagaaggggtatagttttagaatgttggggaaataaagtttttaggaagagtttgatttggtgtatattggggtgaaaattagaaagagggtttttttgttttttaatagagattaggatgatttgtttttgaaagtttttttagaatttttttattaatattttaggatgttttttagttagatttagagaggggagaatatgggaagggttaaagagatatttttttgttttgtaaattttagagggtttattgttggttttttgttaggtataaaggggaattatataaatttattaaatgtaatatgaatttttattaataattattttttgtttttattaatattatttagtaggagatataaagtaattataaattattttatttttaaaattggtatggaaagtggtttgattttaaaatttttttttttaattaaaatagttggtaaatttaatataatttttattttataagtggtagtagtggttgtgtattgttaagaaataatttgggtggaaattgtttttttgaaaaaagaattttatatttttagttttattgggagtgtaaaaatgagaaatatttttattagtcgtttattagtataatttagaaattattaagtggatttattatttagtattttttttattgttaaattataaatatgttaaaaataaaatatgtatgaaaatataaagtaaatatttaattgtgtgtgttatgataagttaattgaagttaagggaaaatggtaagtaataatgtaagagtaagtttgtagataattttggatgaagttatttaaataatgtattaatttagatattatttagaataaagatagaaaaattgtatgaatttaatttaaatgtatatgttttattattaatttattgatttagtttgatagggtagaagataaagtagagtttagatttggaatacggagaatttagttaataatattaattaagtagtttagataggaattcgatttttttgtattagattagtatatagtgtatatattgaagtaaaatattttaatgaatttagattttttaatttgttaagttttttgtgaaataaaaagaatttatttattatttttgtattaaaaagatttgcgaaattttaatatgttttttttgttaaaatttaaatattttattagtataaatgtaaattgaggttattaatgtttttaggaagagttataaaatttttttttataatttgatttttttttaagtacgttaatttttttatatttgaattttttttattgattatatgagaaatttttgtttgtatttagtggatatatatttatttgaaaatattttttttggttgaaaaggtttgtggtgtgtaatttaaagatattttagatgtgtagtgaattgagtttttagaattttttttttttgtaatgtttatgtataatttattttgattttttataggataggaagattgaatataatataattaagggtaaatataaatatgttttaaggatttagtgtgtatttaagtaatatattgttatttatttttttaagtttgtatatatgattaatgtttaataaaaatgattatatgattgggtgttaatttagagatagtttatttgttgtgttatatttagaggtttaagtttttatttttaggaggtatgtaataaatgtttgttgttttagagatttgtttttggtaattgagaatgttgtatataaaggtataatgatggatattatatattggttttattatgagtaatttattaggaaaaatgtaatatataatatgtaaatatgtaaaatatatatatatattagagttttggggttttttaattttttttggtttattttttagattttttttttatgatgttttttggggttttttttgggttattttttttgggagggtaggagaaagaggatagtgggaggaggaaggaagaggttagagagtagggtatgagtataggaagttgtttttatttcgttttttgtttttttgttttttttattttggatattttttttagtttagggaaaggaagtttgataggatttttttttcgtttagtttagggtaggaatagttgatttatgtttttaattttataaatgttttataaagtataaaaagttgttatttttttttgtttttggataagaaaattgaatataatgaataattgtgaataaaagagttgtttgttaagttatttaggtaatagaaaagtgtttggaaggatagataggttaagttttgaagattgagtggatttattttgtttattaaagattatataaattttggattgatatttagggttcgataaattaaagttaaaaacgggattggtaaaggaaagaaattatatatgtatattattagaatattattttagaaataaaggttcgtgtttgaatggtagttttcgtgtattttttttgtttttattttatatttttttgttatttataagtggagttagtttgtttataagttagagttagtttgttggttttttagttttttaagaattaatatttttttgttttttttagtttttttttggagtatagtttgttatttttttaataattgttttttttgatttttttagaagaggtgtatttattttttatgaggggtagaagtttagtttatattgttaattattttttttttgtggtttggtggagagatttttttggtttttttattttgtgggtatttattgttaagttattaagttttttagaaaaggagtttttatattttttttgaaagtttgagaaatattatagtgatgttgtttaaattattttgaaatgattaattggaagttttttaattgtttttttttttttttttagg

SEQ ID NO: 110 - DNA, 13125 bp, Artificial Sequence
  chemically treated genomic DNA (Homo sapiens)
  unsure (11070, 11234)
tttagggagggaaagaaagatagttgagagatttttagttagttattttagagtggtttggataatattattgtaatattttttaggtttttagggaggatgtgggaattttttttttgaagagtttggtggtttagtagtggatgtttataaaatgggagggttagggaggtttttttattaggttataagggagggataattagtagtgtggattgaatttttgttttttataaaaagtaaatgtattttttttggaagagttaaagaaaatagttgttaggaaaatgataggttgtattttagggagggattagaaagggtaggaagatgttagtttttaagaagttaagaggttaatagattaattttagtttgtagatagattaattttatttgtaggtggtaagaaaatgtagaataaaggtaaagaaaatatacgggggttgttatttaagtacgggtttttgtttttaaaatgatgttttggtagtatatatgtgtaattttttttttttattaatttcgtttttgattttggtttatcgagttttggatattaatttaagatttatgtgatttttgataaatagagtggatttatttaatttttaagatttggtttgtttgtttttttaggtatttttttgttatttgagtagtttggtaggtagtttttttatttataattgtttattgtatttaatttttttatttagaggtaaagaaaaatggtaattttttatattttataaaatatttatggagttggggatatgaattagttatttttattttaggttgaacggaaaggaagttttattagattttttttttttaggttgaaaggaatatttagggtgagaggaataggagggtaagaggcgggatgagggtagttttttgtgtttatgttttattttttagtttttttttttttttttttattgtttttttttttttgtttttttaaaggggatggtttagagggaattttagagagtattatagaagggaggtttggagagtaagttagggaaagttggggaattttagaattttggtgtgtgtgtgtgttttatatgtttatatattatatattatattttttttaataggttgtttatggtggagttagtgtgtggtatttattattgtatttttgtatatagtatttttaattgttaggaataaatttttagaataatagatatttattgtatattttttaaaggtaagggtttgaatttttaggtataatatagtaggtgaattatttttaaattaatatttagttatgtaattatttttgttggatattagttatgtatatagatttgaaggaataaatagtagtgtgttatttaaatatatattggatttttaaggtatatttgtatttatttttggttatattgtatttagtttttttattttgtaaagaattaaggtggattatatatagatattataaaaaaaaaagattttggaaatttagtttattgtatatttaaaatatttttagattatatattatagatttttttaattaggaggaatatttttaaatagatgtgtgtttattaaatataggtagaaattttttatatgattaatgggaagaatttagatgtggaagagttaacgtgtttaaggaaaggttaaattataagggagaattttatggttttttttggaaatattaatagttttagtttgtatttgtgttaatggagtatttgaattttaataagaaaggtatgttgagatttcgtagatttttttagtgtagaaatgataaatgggttttttttgttttatagagagtttgataggttgagaggtttgaatttattagaatattttattttaatgtatatattatatattagtttagtgtaaaaaaatcgagtttttgtttgagttgtttaattggtattgttgattgaatttttcgtgttttaggtttgagttttattttgttttttattttgttaagttgggttaataagttaataatgagatatatgtatttaaattaaatttatataatttttttgtttttgttttaagtaatgtttaaattggtatattatttgaatgattttatttagggttatttgtagatttgtttttatattgttatttgttatttttttttggttttagttaatttgttatggtatatataattaaatgtttgttttatatttttatatatattttatttttgatatatttgtaatttagtaatagaaaaagtattaaatgataaatttatttagtaatttttaaattatattagtaaacggttgataaaaatattttttatttttatatttttaatgaaattaaaaatgtagggttttttttttaagagagtaatttttatttaaattgttttttagtaatgtataattattattattatttataaaataaaggttatgttggatttgttagttattttagttggaaaggaaaattttggaattaggttattttttatattaattttagaaataaaataatttgtaattattttgtattttttgttggataatattggtaaaggtaaagagtagttgttaatgaaggtttatattgtatttagtaggtttatgtagtttttttttgtgtttaataaggagttaatagtgagttttttaaagtttataggatagaaaaatatttttttggttttttttatatttttttttttttgaatttggttggagggtattttggggtgttggtgaagaggttttaaagaggtttttagaagtaagttattttggtttttgttggggagtagggaagttttttttttaatttttattttaatatatattaagttaagttttttttggaggttttgtttttttagtattttaagattgtattttttttgggtttatttaggtgggggtagaataattttaggtagttggaggtagtgaattttatttttttaatgtttggagttaaaaggtattcgttatttttgagaataatttgggtttgttttgtggttattgtttagttttgaaagtgagttttttgggattagggagtaataaaagattttttttttttagttttttgattttaggtggtagtagtgtatataagggaggttgatatgtatatgatatatatagatgagaaaaggagaaaagaataggttatggggtagggaggtagggaggggttattaaagaataagttagggtgaaaaatgaggagaagttaggtatttttggtgtgtataggttagattgttttaagttttttaattatgtaagtattttgtagggttgtttaatgaaattaataatttaaaaaagtattttttatttaaaagttaaaatttatatttttaaaggtgatagtggattgaagaaagtaaaatgaaatgattatgtattgtatgttgatggtatatgggttttatttgatagttatttgggtttttggtaagttgatttttttttatgggttttagttgttttttttgaaaaataggtttttggatattttttttaagtatttaaattattaatttagaattataagattatatttgtaaaattatgttaaaaagtggtttgaaattagattgaaattataaattaaataaatgaattaaaggaaatgttatatttaggaatgttttattttttagaggaaaaaatttttatttttttttttgaatttatttttaatttgttttttttttttttttaaagttagtaatttgatgtttataatatatgtatgtaatgacgataatattttatatatagagtttatagttttaaagtattgataataaataatttaggtttgagataatattttataatataagtaaatgagaagtgatataattatttgtttgtttaaaaagttataatttatttttttaaagtaagtttttagagaaggtgaataatttaatgattttaaatttggggattgttttgtgttttagtatggattatagagttgtcgtagataatattaattaagtagtgtaagtagaaatttatttgttttcgattttgaaaagtataggtaaatatagtaaatttaagattttttaatatttaatttttattatatatggtattggttttttattttttttgttaaaagaaaaggaaaattaaattttaaattttttttgggttttaaatttttttattattttagattgaaggatatttagttaagtgatattagaatgtaataatgtaattagttaaatttttatttaaaaatgtagagtagtagatgttatatttatttatttttttattaataaattttgttgatttttagtgttaattaaaggaaaagttataatttaacggtaattgaaaatatttaatagatatttaatattttttatatgttttagttttttaaaaaaaaaatgaaataatgaaaacgtttataaggttttagaatttagtttgtaagatacggatgtatgttttttatgtattaaaataaaattaagaagtagggttttgttgaaaatgagaattattagttaaatttatgttgggggttaattagggaggagaaaaaggaggtgttaaagagtagtagttggtggtagcgaaaacgatttggaataaagttttgtataattaaataaatgaagttagtttagttcgaggaaatattattgttttaaattttggaggagatatgtttaaagtttttattatgtttttcgaatatagttgagaaagtaagagggattattttttttttttggttttaagaggtatttacgaagtatttatattgggacgttttaggtttgttgatttattgtattattattatgtttttatagatttatagattattttttaggttttttagagagtttttagtaatcggatggtaagaatttaagtcgttagggtttttaaatttagaattttagttaaggtaggaggggaaataggaagaaagagtaatagatgcggaattgtttttttagtttgtaatatataattattagagttggtttttttggagtagttttattttgttttatataataaggtttaaaggtattaagtaataatagtagtggtttttggaggaggtttagttgagatttggcggttgaagtagtagtttgtcgtgtataggaaaataggattagtttgttttgttgttaagttattttagattgtttgaaaagttatgggagtaggatttttatttagcgttggaagggtttgtattttgagttgtagttaagattttagaatttaggagagttatttttagaggaaaagtagtatttgttacggtgtgtaaagaaacggttttgtttatttatttggttgatttttaatgggattaatatagttatttcggagttttatgtaaaaatttgattaaattagggaattaaaaaattaggaagttatgatgtttattgtaaagggaatataagggggtttttggggttttagtaatgtttgttttttgatttgggtaatttaggcgtgttcgttttgtgaaaattcgttgagttgtttatttttgatttgtgtttttttttttttatataatattttaatcgaattttttaaaaaattaatgttaagaagataaatttgaattttgttattaagtgttagtagtgtaaaaacgagtaaaggtagggagtttttttttatagtagtacgtggatgcgtttgttttttttataaatagatgtagtttgtataaattttttgaggaatagggcgttgaaaggatgattagatgagtaataaagtaggaagataattacgattcgaaggtgattgttgaattattttttagtatggggcgttgtttataagtggatggttatataaaggtaagttttgaaaattgttgtattgaaattttttttttattataggatgttagttaattttgtattaatattatgatagggttagaaaacgagtgacgttgtagtattggtatttttgttatttatgagtgttgtgattttgagtcggtttttttattttttttgtttttttgggtttttagttttaaaacggggttgatgattttttttttagtattattatatcgaatggttatgaagattttgtagatagaaaagtattttttaatatatttttattttttagaaatgttatttataaataattttttaaagaaaaaaatttaaagttattgatttttataatagttatatttaaagttagtatgtgtaaaatttttttaggagaaaattgtgtaaataaattaaattagaatagattagattaaaggtttatatagtttgaaaatgaagggttattgagatgtttaaataagatattttattattgaaatattttttgtttttgaattttttggaataaaatattatgattttttgtttatattttttttttttttttttttttaagttaaaagggaaaattaagtgttttaaagttaaataaaagaattaggtttgtaattttagtttttattttgtagttttttgttttggggataagtggtcgtttttaattgtagaggtagatgataagtatttatttttttatttaaaataaggtttttttttcgttttttattggggagggggagtggggaacgagggttgcgtgaacgttttttgttcgtttcgggttgtcgtagagatcgtagtgcggattgtattacgtttattaatcggtgtttttcggagaaacgttttagtattattttaggagaatagagcgcgggttggggttgcggagggattcggcgatttttgttaggagcgaggggagggtcgggacgttagggataaagggaaaggtagagattagagttgtttatttagggatttttagggtaataaagttaggtaaattgagaggtgggggcgcgcggttttcgttagttcgaggttcgggcggagcgtaagtttagttagtcgtgttcgacgggggcgtcgtagtgtgggggggtaggtgtggcgggcggttcggaggtattgcggtagttcgggtggggttgggggcggtttttttgtgcgttcgaggttgtgttcgtcggatttttacggtttcgtttagggttttcggcgtatcgttattcggttttcgtagagcgcgttattggtgcgagtatcgggcgaggagttgattttattcgttgacgttttttttatcgattttttttaagttattattttcgaggttgggatttttaaaagtagtagttttatttcgtaatttggggttttattgttttttttgagagttgtagttaaggttttaagggcggtagcgaggcgggttttgtttggtggcgaagcgtaggcggttttgtattttagtattttttcggggaggggggggcggggggagcgggcgtggttttaggattagtttagttattttgaggaaagaaaggatcgggaggtttgaaattagaaaaggcgttttttaggggttgaggtagtcgtggtgaggatgaattttacgcgggttttggtatatgggtttcggttttaggtttgcggtggtgggggttttagtttttttttgaggttagaagaggattgaaaggagtggttgtattaggttttttttatttttttgttttttgcggttgcggttttattgtggtttttgtttttttgatatttgtattttatttagcgggagaggcggtggttaatttagtataggttgcggatttagcgtggtgatagattttttaaggttattggagattttttttttgggttttatatttaataattcggattatttttaattagtttagaaagggtttggattaagtatgagaggtgacgaggagaggtatgggtgcggggcgcgcgggaggagcgtagtgatcgtcgcgttttgggtggggtcgtgtttgcgcgttttttagcgcgcgtttttgggggcgcggggttatttatcgagttcgatgttgtcgatggtacgtcgtaggtgtttttcggttacgatttcgtcgacgattattagtaagtagaatttgttgttaaggaagcggtgcgataggttaggcgaggtggacgtcgtcgggttggcgatgttgtcggacggtttcggttcggtggtttttattattacggtcgttattttgtcggttgttgtgtttcggcgaagtgtttcgtttcggtcgttttttttttttgcggtaggagaaaggattattttcgaaggtgttgttttcgtttcgttttttgcgtttttttttttttggcgtcgcgcgtcgttttttttttcgtttttttttagcgtcgcggagagtgcgcggcggagaggagcggggagtgagagagggcggggaggcggcgtcgtttttatatggagattaggtagggagtcgggaggaggaggaagaggaggaggaaaggattattcggtatatttttacgcggtggttgttttcgtttttttagtcgttggttcggggttgatgttatttgtagtaaattatttcgttcgcggttcggaagttggagggacgaggtgtgcggataatggtcggggtagggtcgcgagttaaggggttggggcgttcgttgagtttttgttgtagtcgtgaagggggaagacgtttttaatttatattatttattacgtatatatttattgtttattttttatttttattttgtttgtgtatgggaatgggatgagtttttattttcggagtgggggtttttttttttgttggagttgtattagttaggtttttgttttgtgtgttgtgtatgatgtagttaggtttttaggaattgggatagttatagtgggtagatgcggggttgtgggtatttcgtttaggaagacggaatttgttttttttttgattttgtggttttaagaagacgaatttattgatatttattaatattaatatttattatttttatttaaagaatatattaaaaatgtaaaatttaagtttattattgtttaggttttggattttattttggtagggttaaggatgaaaaagtattggttttgtggtgtttatgggaaatgagagaaatgtagatgtattatattagatattaatttttttttttaatgtgttgaatagatagtattagtaataataaagaataaagagaagatattgtttttatttagtagggttatagtgattataatgtattttttagttttttggggaatatataagtaaaattatttcgtgataatgatgttttttaaaatatttgtagtattgggaatttttattgtttttgtttgtgtttagaagaattaaaaaatgtgttttttgtttttgtttttttgttttttttttaaggtagtttatttataatcgttttttataaatatattgaatatagtttttgttttagaaaaggggaggagggtgaggaaagagtaaaatgtgtaaatatggtattatagaagattggggaattcgagttttaaggaagaggaatagatggaaattagttaatatagttttaatattagaatgtttgttagtaaaatatagatgatagatagatagatagatagatagatagatagatagatagataattatttagatatttttaagatttttaaaataatttagtgttttaggtgttagttgttatgatttattggttatgtattttttgtttttatattttttttgatattttggtatgggagatatgttgggtagttaagggttggggggttttatttaatatgttaatttgattaatgtagaatgaaaatatcgtttggttcgtagtatttgggatttgtgataggattattagagagttgtatttattagtaattagatgaagtgtttttaattagttgtatttattagtaattagatgaagtgtttttagataatattttggttaagatatttaattgttgtttaagaagtaaggttagtattaaagtttataattggggtgaggggtaggaaatatggtgaagagtattgttttttaaaggttattcgttggattttagttttatttagtttgtgtttggtttttttttttttgaattattgttatttttatgtatgtaatagtttttttttatgtagtttattttttttatttaaatttatttttaaatgtaattttatgttgttgtataaatggaaatattaatattatttattaatagaaagtatttttaaaaatatatataatgaagataagatgtgattaaatttttgttatatattgttatgatttgtttaagattttgagtttaaggttttttttttttggttgaaaatagagattggttaagtgttagagaggtattaaagagatattaatatttaattgagttgttttttatgttgtaatagaagattggatgaaaattataatagagcgtttttttattgtgtgtgtttgtgtaattaaatattatgatcgtgattatttaagttattatttatattttgaaaaatagaggtataatgggagaatatagattagggatgtagaatattattttatagttcggtaattttggtaagtgatttattttttttgattttttatttttttatttaatgagaagaagaatatttttataattgttaaagtaattgtaagaaagaaggaaatgatagaatgtgtaagtatttaatatagtggttgggtatagtaagtaattaagggatggttgatttattgatttgtttttttttagttattaagataatggagtaaaagtagttttataaaatgtgtaagtgatattgttataatatttttgaaataagaatagaatattatattattatattttaatattagaaaagtagtttttttttttttttattttaagaaaatgtatatagttttaaggaggaaaaagggggaaaattaatatataagagtattaatattgttagttgtttaattgtgagttgggtattatttataagatggagattattatttaataaatattgtgagggttatttgtgtttagtataggtttcgtattaggaatttaattntggattagttagataaaaattttttttaagtgtagttagtatttcgatattaatagatagatgaaagttaaataatagagatataatacgttaggtagtgataagtgtaatgaagaaaaataaagtagggtgaggggatagtaaatggaggaagatgttgtttntggtaggttagagaaagttttttgaagaggtagtattggatagagatttgagtacgttgatagagggtcgttgtgataatttgggagaagagtattttaaggtaggttttgagatgagagagtatatttgttatagttaattaatagtaaagtggttaggagtttatggttataaaaaaaaaaaaaaaaaaaaaattgggtatttggaaagaggtgagaaatgtgaataatagaaatggattaaaggttaggttaagttagtagaggagatttttagtgtgtaaatgtgttaaaaattgtttttattttttttttagtagtttggttttttttttatttttataattataggttttgatagtattggaatgaaaatttttgtgataaattttggaggtttgtaaattttttagattgatgtttagaaagaaaagaagatataagtaatagagagaagttgaattttagagtaaaagattaatttgaatttgaaattttttttataatattttttaagtttttttattttgtgaaatagttatttatattgtttgaaattttattaaagatatatatgtattattatatgtttttttttaaaagaagaaaatttttaaaatgtgattagaagtgttatttagttatttgtatatgagtataaattagtgtgtttatttttttttttaatatttagttgatattattttttttagaagaaagagtattttagttaagggtaaaagataataagtaattttttatgtttttttatgtattttgttttattttatatttttgttgtttttgaaaaaaatttgaggtagtaaatatttttaaattttgaagatttgtggaataagatggattgattttatttttttttttattatttttgttttttttatataaaatagtgatgttatttatagttgaaggtatagttggaatatgtttggaggtttggagatattgaattaaagtgatttttgagaatatagaaagtaaattgttttttattagttatattataaaattcgtatatgttggataagagtaatattatattaatttaaaataagttaataaataaataaataaaaaaaaattagaatggtttttaggttattaattttggttttgatttgattgaagatattattataattaaagtaataatgtatttggtaaaaaataataataataaataagaaaagttagaaagtttagaaaagagaatgtgaaagaagtaatttttaagttttgattatgtagaatgttagaagagagattagtagggtttaaagttgttttgtttagttttgtgatagttgatttttgatttaagtgaggtttaatatagttttttgattgtattttagttttttttgtagatttgtttttagggaggaaatgtattggtagtaatatgtttgatagttagtaatttttttaattgttattttggttggtatatttagttggtatgagtttgtttaatttgagttagattttgaattttaattatttttgattttaaggttataagaggttgtgtgtatatgatttgattattatgaattgtggtttaggattagaattgtattaataaagagagggagaaaaattttttttttttaatttttttttttgtttttttttattgttttttattagtttttttttttgtatcgatatatattttatttttagattttttatttgtgttataatttagttttattatagataaagtggtttttggggatatcgtgagattttttttttattgttatttttttgagaaaaaaaaaaaaaaatattgttaattttaatgtttgatttttaaataaattttggattatgatttagttataatgtggggatattttgt

SEQ ID NO: 111 - DNA, 15825 bp, Artificial Sequence
  chemically treated genomic DNA (Homo sapiens)
atttcggggttggtatgtttttggtcggggaggggtatggaatgtttttggatggagatattatttgtggtttatggttatggtgattttagttattaggttgatgttttttggatttaggtagtttttgattaaggtgaatttaaaatgatagtgtttgtttaagatggtaatattcgtgttttgttattggtgattttggtttggagttgggtaggttttgggaaagaaatattggtggttgggtacggtggtttacgtttgtaattttagtattttggtaggttgaggcgggtggattacgtgaggttagtagttcgagattagtttggttaatatggtgaaattttttttttattaaaagtataaaaattagttagtatggtggtatatatttgtaattttagttatttaggagattgaggtagaagattcgtttgtagttgggaggtggaggttgtagtgagttaagatcgtgttattgtattttagttttggcgatagagtaagatttggtttttaaaaaataaataaataaataaataaataaaaatataaaagaaatattggtttatttgttggttattaattttatttttgttaattttatttgttttttggttttttaggaattagttttgatttttcgggtttaagttatttttttaagtattttagttttttaagtatttaggattataggtatgtattattatgtttggttaattttaattttttgtagagatggggttttgttatgttgtttaggtaggttttgaatttttggttttaagtaatttttttgtttttattatttaaagtgttgagattatagttatgagttattatgtttggttaggtatttgtattttttttttttatttatattttgttgaaatgttttatgtagggttttggttttttttttttttgttttttggtgatgattgatttaaggtttttagtttgttggttaatggtgttaggtattattataggtattttatatgtattaataattttaagagataagtaggtgtttttaatgtttttttttatagaagaggagattgaggtattgtggttaggtgattttttttttttttttttttttttttttttgttttttgagatggaatttcgttttgttaattagttggagtgtagtggtgtgatttcggtttattgtaagtttttttggagtttagggaagaggtttttgttaaagattttgtagtttgagttattaatgtatagaagaaatgtgaagagttaggttttaattattttggtttttttttttatttttttatattgttttagttttatttttttttttgtttttgagatggagtttttttcgttgtttaggttggagtgtaatggtgcgattttagtttattataatttttgtttttcgggtttaagcgatttttttgttttagtttttcgagtatttgggattataggtatatgttattatgttcggttaattttgtatttttagtagagatagggtttttttatgttggttagattggttttgaatttttggttttaggtgattcgtttgttttagttttttaaattgttgggattataggtgtgagttattgtgttcggttttatttttatttttgaaggatgttttttttggatatagaattttggatatatagttgtttttttttttttttaattttttagttatttttttttgagatagggttttatttttttgtttatgttggagtgtagtggtacgattatggtttattgtagtttttgttttttgggtttacgttatttttttgttttagttttttgagtagttgggattataggtgtgcgttattacgtttagttaatttttgtatttttagtagagatggggttttttttattatgttggttaggatggttttgatttcgtgattttgtgattcgttcgttttgggtttttaaagtattgggattataggtgtgagttatcgcgtttggtttatttgattatttagaatataattttgtgattggtgtgaagtagtgatttaattttatttttttatagtattatttggtaaatagtttattttttttttattgattatattatttttgtcgtatattgttttaagtatgtatgagttatttttaggttcgttttttgtttcgttggatatttgtttatttttgtgtttttagtatattatgattgttattttatatattattattattattatttttttttttttttgtagagttggggttttattgtgttgtttagattggtttcgaatttttggttttaggtgattttttttttttagttttttagtatgtcgagatgataggttttttttttttttttttttttgagagagagagtttgttttgttatttaggttggagtttagtgatacgattttagtttattgtaatttttgtttttcgggtttaagcgatttttttgttttagttttttgagtagttgcgattataggtgtgtattattatgttagttaatttttgtatttttagtagagatggggttttattatgttagttaggatggtttcgattttttgattttatgatttttttatttcggtcgtttaaagtgttgggattataggcgtgagttatcgcgttcggttttttgttttttttttgtttttttttttgtttttagttgagtttgttatatgggttttagtgttttattttagattttttgaattaaaatatttaggagaaaaatttaaggttttttttttttttttttttgagacggagttttattttgttatttaggttggagtgtagtcgcgtaattttggtttattataatttgtaatttttgtttttcgggtttaagcgatttttatgttttatttttttaagtttgggattataggcgtgtgttattatgtttagttaatttttgtatttttagtagagatggggttttattatgttggttaggttggttacgaatttttgattttaagttattcgttatttttagttttttaaagtgttgggattataggtgttagttattatatttggtttgttagtttttttgaggtagagttttgttttattatttagattggagtgtagtggtttatttttggtttattgtaatttttattttttgggtttaagcgatttttatgttatagtatgagaagtgggattatagggattagtaggtgggattataggtgtgagttattatatttagttaggtttagataattttaaaatttatttttttatttatttagaaatggagttttattatgttgtttcgtttggttttaaatttttggttttaaggaattttttttttttggttttttaaagggttaggtgataggtatgagttatattgcgtttagttttgagtttttgtgttcgagatatagtttatttagaatttttggttggtattttttatttggtatatgtagggtattttggattttttattatttttgagtattggtttgaatttatttgtttgtttttttttaggggttgtttcgtgtattttttgtttttagggtggggatggggttggatgtttggggttgtagaggggattagtagagggtgatttttttttttatgttattattttagattttggtttttgtttttttttaaatatatagtaattttggtttttagtttaggtgggaaagggagaaagaatcgattttttttagtttttttttgaaagtagtttaattggtattgtttaggaataaggagtttttgagagtgttggtattttacggtgttgatgttcggtagttttttgttgtgaattttgtttttgttttattttaatttaaggattttgtggagggaattttaggtttttttaaagtttttgtagtattagttgtttttaaggtttaatatagtgaagtgatagggagataggattttgggggagtttggggataattgtgggagtttttgtaaggtgggtaagagtttggttatggtattttttggtttattttataaaaaaggtggatgtttttgagatttagttttgttatgtttattatagttttattagttttttttggatgtttgatttttagttgttaaatatttaggtgttagtagttgggggtggggtaggataagaaggggggtgtttattttaatttttttgtttaaattatttattttaaagtattgtgaagaaggttggattagtgttaaatttaataaagttaataaagtaaagtattgtagtgagtatataataaatagttgttgtatgaggaattttttgaaatgaatttaagatgagttttgaaaaacgagtgggagtaagtcgtgtacggaagtagaggtttagtagaggtttagcgttaagttttagaggtttgagagggtaagttttggtgggggaaaaggtagaagttgtgattggttgtttttgagagtgtaagtagttatgtaaagttgggaaaattagacggcggtcggagtcgtgaattaggggtaaatggaggatggtgttggggtagttattagtttgtcggaatggaagaagaggggcgtttgggggcggtaaggtttaaaggatattggaggggtttcgggatttggggtaggattataggtttagtttatttaaaggtggtttcgtgttaggtttttttagaattaggttgaaaagaattttagggttagataggttggagatgagaaattggattatgtaggaagtattgtcggaggcgtgtttttgattttattattttgagtcgtttacggttggggtagttttcgaggttttattttaaggggcgggtcggggcggggtttcgttgtttttttttagaggtcgcgtttgttgttgagtagatgtagtagtcgaaattgcgcggaggtatagaggtcggggagagcgttttgggttcgagggtttaggtaggggttgagttattatttgatcgtaagttgcgtcgtgtcgtcggttttgtaggtattatgagttaggatatcgaggtggatatgaaggaggtggagttgaatgagttagagttcgagaagtagtcgatgaacgcggcgtttggggcggttatgtttttggcgggagtcgagaagaatggtttggtgaagattaaggtggcggaagacgaggcggaggcggtagtcgcggttaagtttacgggtttgtttaaggaggagttgttgaaggtggtaggtagtttcggttgggtacgtattcgttgggtattgttgttgtttttttggttcggttggttcggtatgtttgttggtgtcgtggttataatcgtgcgagcgtcgcgttgtcgcgagttatcggcgtagaagtggtggtatacgggcgttttttatcgtatcggcgatttttaggttttttagggttacggcgcgggtaatttggcgggtgagtgtagcgcgttttcgtttcgggtattttcggttgaatttggtggtttgtatcgatttttttttttgtttttagaaaaaaaaaaagaatagttttttttttttttttttagaagatttttttttttgtttgtttttgttttttgttttgtgttttttttgagattgagtttagttttgttatttaggttggagtgtagtggtgtaatttcggtttattgtagtttttgttttttgggtttaagtgatttttttgttttagttttttgggtaattttttgtatttttagtagagatagggttttatcgtgttagttaggatggtttttattttttgatttcgtgatttattagtttcggttttttaaagtgttgggattataggcgtgagttattatgtttggtttataattataaatttttttttttttgagatggagttttgttttgtcgtttaggttggagtgtagtggtgcgattttggtttattgtaatttttatttttcgggtttaagtaatttttttgttttagttttcggagtagttgggattataggcgcggattattatgtttagttaatttttgtatttttagtagagacgaggttttattatattgtttaggttggtttagaatttttgattttgtgatttattcgttttggttttttaaagtgttgggattatagatgagttattgcgttcggtttataattttttttttttttttgagacggagttttttttttgttatttagaatggagtgtattggtgcgattttgatttattgtaatttttgttttacgggtttaagcgatttttttgttttagttttgcgagtagttgggattataggtatgtgttattatatttggttaattttgtatttgtagtagagatgggggtttttttgtgttggttaggttggtttttgaatttttgattttaggtgattcgttcgttttggttttagaaagtgatgggattagaggcgtgagttattgggtttagttataaatttttataattggtttggaggtagaatgtaaggatattggaggatttaggaagatatttttgagtaagtgatatttgaagtgaaatttgaaggagtgagtagtagtttattagataaagggattgggggtggaggatagggaggagagagttttaagtggaggaagtagtgtttaaaggttttaaaataggtgtatttgaggaattgaaaggaggatataggtgggaatatagaatataagaaagtaggagataagaggtaagaggtattgtagaagtaggtagtatatgtagagtttttagagttattgtttagatttgttttttatttttttttttttttgagacggagttttgttttgttgtttaggttggagtgtagtggcgtgatttcggtttattgtaattttcgttttttgggtttacgttatttttttgttttagtttttcgagtagttgggattataggcgttcgttattacgtttagttaattttttgtatttttagtagagatggggttttattatgttagttaggatggtttggattttttgattttgtgattcgtttgtttcggttttttaaagtgttgggattataggcgtgagttatcgtgttcggttaagggtatttttattttataggcggttgtaaattgtttttttagaacggatgtattaattaatgttgttatttatgtaatttgtatttttttaattatttggtttagttagatgtttttatattgttaatttgacggatatgaaattttatttttttgttattttaatttgtattttttagattattaatgaggttttgtaatttttattatttttttgtatatttaattttgtgaattggtttttttgtttttgagacggttttattttgtcgtttaggttggagtgtagtggtgtgattttagtttattgtaatttttgtttttcgtgtttaagtgatttttttattttagtttttcgaatagttgggacgataggtttgtattattacgtttcgttaatttttgtatttttagtagagacggggttttttatgttggttaggttgttttttggttaggtttgtttcgaatttttgattttgtgatttgttcgttttggttttttaaagtgttgggattatagacgtgagttatcgtatttggttttttttgttttttttttaaaattttttttttattttgaggttagaaagatatttttatttttttttgaaattttatttatttatttatttatttatttttttttgagatagagttttattttgttgttagtttggagtgtagtggcgtgatttcggtttattgtaatttttgttttttaggtttaagttatttttttgttttagttttttaggtagatgggattataggtgtgcgttattacgtttagttaatttttgtatttttagtagagatggggttttttttattatgttggttaggatggttttgatttcgtgattttgtgattcgttcgttttggttttttaaagtattgggattataggtgtgagttatcgcgtttggtttatttgattatttagaatataattttgtgattggtgtgaagtagtgatttaattttatttttttatagtattatttggtaaatagtttattttttttttattgattatattatttttgtcgtatattgttttaagtatgtatgagttatttttaggttcgttttttgtttcgttggatatttgtttatttttgtgtttttagtatattatgattgttattttatatattattattattattatttttttttttttttgtagagttggggttttattgtgttgtttagattggtttcgaatttttggttttaggtgattttttttttttagttttttagaatgtcgagatgataggtaataataataataataataataattattattattattattattattattattatttgagatggagttttgttttgtcgtttaggttggagtgtattggcgcgatttttatttattgtaagtttcgttttttggtttaaggtttaggtgttttttttgttttagttttttgagtagttgggattataggcgtgtattattatatttagttaatttttgtattttttagtagagacggtttttattatatttcggttaggttagtttcgaatttttgattttaggtgatttgtttttttaggttttttaaagtattgggattataggcgtgagttattatattcggtttatttttgaatttttttttgggttataataagttattttttaaggtttggtttttaggttttgttaggtgagagtagagatgttgttaatttttttttttaagtgatttttttgagttttttatttagtgttttgaatgttatgagttttatttttattgtggttggtgggaagataaattgtttttggtttgtgtgaattttgtgaattatttaggtttttttattaaatgtatgtattaattattatttatttgaagattttattaataataaaattttttataaatttttagtgttttatgtagtttttttttttttagttttttgttttgtgaatttttgttatttgggtttttttagatttttaattttgtttttttaatttagggagatttttgggttttaagtagattttttttttttgttttgtagtttgtaaattttttttaggaagtaaattggtttataaggtttattttgtttgtttgttttttttaggaataattgttttgaattgtttattgtttaatgtttaaaaatagttattatataaatttaatttgttaggtttttttattagttaaaggtaggagagtatttattatttattaatttttgtttttttattttggttggaagtagaattttaataattgatatattattgtagttttatgattttttgtcgaatatatttttataaatagaaatgattgaagatattaaagataatatttttttatttttatgtatagtataacgacggtattgtaatataattaaagaagaagatattatttagaaattttttatttggttttagttgttagaggtatttaaattagagtaattttatttttaataggggttaggttaaataaggttgagatttattgggtcgtatttttagaaggttaggtatttttaattataggatgagatagaagttcggtaggattggtagtataagatataggttataaagattttgttgataaaataggatgtagtaaagaagtttattaaaatttattaaagtttagatggtaatgaaagtgatttttggttatttttattgtttattatatgttaattaattataatgtattaggacgttgaaagatatttttattagtattattatagtttataaatgttatggtaatatttagacggtattttatatagtttaaaaaggggaggaatttttagttttgggaattgtttgttttttttttagaaaatttatgagtaatttattttttgtttagtatataattaagaaataattttaaaaatagttaattagtagtttttagggttgttttgtttgtggagtagttatttatttgtttgtttatttttttaataaaattgtttttattttattttatgaatttatttgaaatttttttttatgtaaggtttaagaacgtttttttggagtttggattaggatttttttttagtaatatagttacgtggaggatgaggtggtaggatggtttgagtttaggaggttaaggttttagtgagttgtgattatgttattgtattttagtttgggtgatagagtgagattttgttttaaaaaaagaaaatgtattttttttgtattacgtatggaattaattgagagatatagttgttaaatattttattatgtggttaaaaataataaaaagtatatgttttttgaaggtaaaaagggtttaaaagaaaagaagaagaaagtagttatatatgttttatttttttttttagatttattaattaaataatttattttttattttataaggaaataagaagttagaagaatggaagtttttttttttattcgttatttagtatttttttttagagaggaagaaagatatttttaattatataaggaatattgttgttttaaatgtatttagaatggaaaaggaaaagttttagttattaggaaataataaatttttaaaataatttttttattgtaaaaaaaaaaaaaattagaaaattgggtttagtacggtggtttatgtttgtaattttagtattttaggaggttaaggtaggcggattatgtggttaggagttcgagattagtttggttaatatagtgaaattttatttttattaaaaataaaaaataaaaataaaaaaattagtcgggtgtggtggtaggtatttgtaattttagttatttgggaggttgaggtaaggagaatcgtttgaatttagggggtagaggttgtagtgagtcgggattatgttattgtattttagtttggtaataaaatgagattttttttttaaaaaaaaaaaaaaaaaaaattttagaaaattgaaggaaatgtgaaaaataataatgtttagatattggataataggtagcgtaggattgtaatttttgtgagaagggaaatagattatttaaggtttattattaggttgatgtaaaagtaattgtggtttttgttattatttttaattgtaaaatttgtaattatttttgtattaatttttattatttaggttttttttttgggagtaatttttggattgtagtgtggagatgtggaatttaaatagagttagtaattttattgagttgaggagaataaaagagaagtttaggatggttaaggtagttagattttttaggagaggagagagttatgtaaataaatttgtagaatataaaaagtatttttataatttaataaaaagaagttaaatattttaatttaaatataggtaaaaaaaaattatatatacgttttattacggtagatatatgaatagttaataagtatatgaaaaaatgtttaatattattagttattaggaaaatgtaagttagattataatgagatgtttttttatatttatataaatggttaaaatgaaaagattggatatattaagatgtcggtaagaatgtggaataattggaatttttatttattgttggtagaaatgtaaaatttggaaatattttggaaaataatttgatagtttttgataaagttaaatatatgatttagtaattttatttttaggtatttatttaagagatatgaaagtatatgtttttttattatatataaatgtttatggtagttttttttataatagttaaaaattggaaataatataaatgtttattaataggtgaatgaataagtaaattgtggttatatatataatggaatattatttagtattaaaaaggaatggggttaggcgcggtggtttacgattgtaattttagtattttgggaggtcgagatgggcggattatgaggttaagagattgagattattttggttaatatggtgaaatttcgtttttattaaaaatataaaaattagttgggtttggtggcgtatatttgtagttttagttattcgggaggttgaggtaggagaattttttgaattcgggaggtggaggttgtagtgagtggagattacgttattatattttagtttggttatagagtgagattgtattttaataataaaaaaaggaatgaattattggtatattataaggtggatgaattttaaaaatattttgttgagtaaaagaagttagatataaaagaggatatattgtatgatattatttatttgaaattttagaaaagataaatttattgtttagggtagaagatgagatttggttaggatatagtattagggaattgttggggtgggagaggtaggagatgaaaatgttttatatagtggttatatggtataaaaatttattagagttgtttgtaattatagtattttgggaggtcgaggtaggtgaattatttgaggttaggagtttgagattagtttggttaatatggtgaaatttcgtttttattaaaaatataaaaattagtcgggcgtcgtagtttatatttgtagtattagttatttaggaggttgaagtatgagtattttttgaatttaggaggcggacgttgtagtgagttgagatggtattaatgtattttagtttgggtaatataacgagattttgtttttaaaaaaaaaaaaaattgttagagtttgtaaaaatgtatttttaaaattgatgtattttattgtatatattaaattttaataaagttttatttaggtgtatgaattatgtttaattaattagtatttttatttagggttttgatttttgcgatagaatataaagttgtaggaatatttgggaaatgatatataatagtaatcgttttttgtttttttgggggtttttttgaaaatttcgggtttttttaatacggggggggatatataaaaaaaaaaaaaaaaaaaataattatagtatgataagaaagagaaaatgtgttttttttttttgtagtagtagaaataaaaagtagatttttttttgtatcgtaaaattatttttgtaaatgttatttttaataagggagtttcgttagatagttaattttatgagatttgttttgttttgcgaaagtaatttttaatttttaaaaagtttgtgattttgattgtttgttttttttaatagtgtgttgttttggtaataatatttaaatttatatttgtgttttttagaaggtataaatatttgtgagttttttttgttaagttagagggggagtattgatatatttttttttttttacgcgtatgaagtagaataaatttagtgattgtaagattttttaattaaataaagaatttgagaatattgttttatttaaattaatatggagattaggggtggtggtttacgtttataattttagtattttgggaggttgaggtaggaggattgtttgagtttaggagtttgagacgagtttgggtaatatagtgatattttttgtttttataaaataaaaaaaattagttgggtgtggtggtgtgtttttgtagttttatttatttgggaggttgaggtgggaggattttttgagtttagtaatgtgaggtcgtagtgagttattttagtttgggtgatagagtgagattttttagtttttttttttttttttttttttttttttttttttttgagacggagttttgttttgttatttaggttggagtgtaatggtgttatttcggtttattgtattttttgttttttgggtttaaataatttttttgttttagtttttcgagtatttgggattatagttgttcgttattatggttggttaatttttgtatttttagtagagacgggtttttattatgttagttaggttgattttgaatttttgattttaggttatttacgtgttttggttttttaaagtgttgtagttataggtgtgagttattatattcggttttttaatttttaaaaaaaaaattatgtaggtagtaagttagaggtagcggttatgaagagaggtggaagttgagaataagtatttttgggaataaggtaagtgagttgattaaggataagtataaagatgtgaggtggagttatgaggtttttgagtagaggttaggaattttatatttgttttggtgttaatttgttagagagtgggagttttttttagtagtgtttgattgtttatgtgtcgggttagagaagatggatggtagtattgatttagggtggtgaatttgtggtagaagtaaggggtcgggggattatgagtattggtggtgttgaggaaagattgtagggtttaggttgtttagggaaagaaagtatttgttgaggatgggtaaggatagggtttggaggaagatgagaggttgagggggtgggagagtgagagtggaagatattggggttttagtttttgaagcgggagtagttgagggttttggatttggttgatatagggtagagggtaaggtttttggggttgaagatattatgatattggtattattgagttgaatgggttatttagttaggatggtggttagatttaagaggaggaggttgggcgtagtgatttatgtttgtaattttaggagtgagattttgggaggtcgaggtgggaggattataaggttaggagtttgagattagtttggttaatatggtgaatttcgtttttattaaaaaaaaaaaaattagttgggcgtggtggcgtgtgtttgtagttttagttatttgggaggttgaggtaggagaattgtttgaattttggaggcggaggttgtaggttgtaataagtcgagattgcgttattgtattttagtttggtgatagatcgagatttcgttttaaaaaaaaaagaaagaaaagttttgaattttttttttggatgttttgatttagaaggtttgggatgggatattagaatttatgtaataagtttagttaagaataagagaaagaataaaaaaagaataagaggtcgggcgcggtggtttacgtttgtaattttagtattttgggcggtcgaggtgggaggattatgaggttaggagatcgagattattttggttaatatggtgaaattttatttttattaaaaatataaaaattagttggtatgatggtgtatatttgtaatcgtagttatttagaagattgaggtaggagaatcgtttgaattcgggaggtagaggttgtagtgagttgagatcgtgttattgaattttagtttgggtgatagagtagggtttttttttttaaaaaaaaaaaaaaaaaaaaaagtttaaaaaaacggggggggttttgggaaaaagggggttggttgggaaaattggtttaaaaaaaaaattttcgggttttgtatcgacgattgttttttttttttttatttttttttcggtatattgttttttttttttttttttgaagaaagtcgattcgttttttatttcgttacgagggtgggtgatttagcgtttttttttttcgcggcgttagaagttagttgtaatcggtttttgaagtaatgtgtaggattttttatattagtttttttgagtttcgtgatttagttttgtttttttttttttttttttgtttttttttcgtttatttttaggcgttgggagaagggagggtggggaggttaggggttttttagaggggttttatttgttaatttagtttttattttagg

SEQ ID NO: 112 - DNA, 15825 bp, Artificial Sequence
  chemically treated genomic DNA (Homo sapiens)
tttgaaatgggggttgggttaataagtgaggtttttttgagaggtttttgatttttttattttttttttttttagcgtttaagggtggacggggagggggtaaagggggagagagggaggtaaggttgaattacgagatttagaggagttgatgtaaggagttttgtatattattttagaaatcggttgtaattggtttttggcgtcgcggggaaggaggacgttgagttatttattttcgtgacggagtgaggggcgggtcggttttttttaaagaaaggagggaaggataatgtgtcggggagggggtgggggaagggggaatagtcgtcggtataaaattcgggggttttttttttgaattaatttttttaattaatttttttttttttaaaatttttttcgtttttttgaatttttttttttttttttttttttgagagagagagttttgttttgttatttaggttggagtttagtgatacgattttagtttattgtaatttttgtttttcgggtttaagcgatttttttgttttagttttttgagtagttgcgattataggtgtgtattattatgttagttaatttttgtatttttagtagagatggggttttattatgttagttaggatggtttcgattttttgattttatgatttttttatttcggtcgtttaaagtgttgggattataggcgtgagttatcgcgttcggttttttgttttttttttgtttttttttttgtttttagttgagtttgttatatgggttttagtgttttattttagattttttgaattaaaatatttaggagaaaaatttaaggttttttttttttttttttttgagacggagtttcgatttgttattaggttggagtgtagtggcgtaatttcggtttattataatttgtaattttcgtttttagggtttaagtaatttttttgttttaattttttaagtagttgagattataggtatacgttattacgtttagttaatttttttttttttagtagagacggggtttattatattggttaggttggttttaaatttttgattttgtgatttttttatttcggttttttaaaattttatttttgggattataggtataagttattgcgtttagttttttttttttaaatttggttattattttggttgggtgatttatttaatttaatagtgttagtgttatgatgtttttagttttaaggattttattttttattttgtgttagttaaatttagagtttttaattgttttcgttttaagagttaaaattttaatgttttttatttttatttttttatttttttagttttttatttttttttaggttttgtttttgtttatttttagtaagtgttttttttttttgagtagtttggattttgtagtttttttttagtattattaatatttatgatttttcgattttttgtttttattataaatttattattttgggttaatgttattatttattttttttgattcgatatatgggtagttaggtattgttggaaaaagtttttattttttggtagattggtattagaataaatgtagggtttttgatttttgtttaggagttttatggttttattttatatttttgtgtttgtttttagttaatttatttgttttatttttaaaagtgtttgtttttaatttttatttttttttatggtcgttatttttgatttgttgtttgtatgattttttttttaagagttggggggtcgggtgtggtggtttatatttgtaattgtaatattttgggaggttaaggtacgtggataatttgaggttaggagtttaagattagtttggttaatatggtgaaaattcgtttttattaaaaatataaaaattagttagttatggtggcgggtagttgtagttttaggtattcgggaggttgaggtaggagaattgtttgaatttaggaggtagagggtgtagtgagtcgagatggtattattgtattttagtttgggtgatagagtaagatttcgttttaaaaaaaaaaaaaaaaaaaaaaaaaaaaaaaaaagagttggggggttttattttgttatttaggttggagtggtttattgcgattttatattattgggtttaagggatttttttattttagttttttaagtagataggattataggagtatattattatatttagttaattttttttattttgtagagataaagagtgttattgtgttgtttaagttcgttttaagtttttgggtttaaataatttttttattttagttttttaaaatgttgggattataggcgtgagttattatttttggtttttatgttgatttaaatgagataatatttttaaattttttgtttgattaagaaattttgtagttattgggtttattttattttatgcgcgtgggagaagaggaatgtgttaatgttttttttttggtttaataaagaaaatttataggtatttatattttttagaaaatatagatgtgaatttaaatattattgttagggtaatatattattaaggaagataagtaattagaattataagttttttaaaagttaaaggttattttcgtaggataaagtaagttttataaagttaattgtttgacgagatttttttgttagaaataatatttgtaaagatggttttacgatgtaaaaaagaatttgttttttatttttgttgttgtagaaggagagggtatatttttttttttttattatattgtggttattttttttttttttttttttgtgtgttttttttcgtgttaaaagggttcgggatttttaagggggtttttaaaaaaataaagggcggttgttattgtgtgttattttttaaatgtttttgtagttttgtgttttatcgtaagagttaaggttttaggtgggagtattgattagttgaatatggtttatgtatttgaataaaattttattagggtttagtatatgtaataaaatgtattaattttgggggtatatttttataagttttgataattttttttttttttaaagatagagtttcgttgtgttgtttaggttggagtgtattggtgttattttagtttattgtaacgttcgttttttgggtttaagagatatttatgttttagttttttgagtagttggtattataggtgtgaattacgacgttcggttaatttttgtatttttagtagagacggggttttattatgttggttaggttggttttaagtttttgattttaggtgatttatttgtttcggttttttaaagtgttgtgattataggtagttttgataaatttttatattatgtaattattatatagaatatttttattttttgttttttttattttagtaattttttagtattgtattttagttaagttttattttttattttaggtaatggatttgttttttttggagttttaaatgaatgatattatatagtatatttttttttgtgtttggttttttttgtttagtaaaatgtttttgagatttatttattttgtagtgtgttagtagtttatttttttttttattattgagatgtagttttattttgtggttaggttggagtgtagtggcgtgatttttatttattgtaatttttatttttcgggtttaagagatttttttgttttagtttttcgagtagttgagattataggtgtgcgttattaagtttagttaatttttgtatttttagtagagacggggttttattatgttggttaggatggttttaattttttgattttatgattcgtttatttcggttttttaaagtgttgggattatagtcgtgagttatcgcgtttggttttatttttttttaatattgaatagtattttattatgtgtataattatagtttgtttatttatttatttgttgatgaatatttgtgttgtttttagtttttggttattataaagaaagttgttatgaatatttgtgtatagtgaggggatatgtatttttatattttttgggtaaatatttagaagtggaattattaggttatatatttaattttattagaaattgttaaattgttttttaaagtgtttttaaattttatatttttattagtaatggatgagagttttagttattttatatttttgtcgatattttgatatgtttagtttttttattttagttatttatatgaatatgaagggatattttattgtggtttaatttgtatttttttgatgattaatgatgttgagtatttttttatgtgtttattggttatttatatatttatcgtggtgaagcgtatgtgtaatttttttttgtttatgtttgaattggggtgtttgatttttttttattgagttgtaggagtattttttatattttgtagatttgtttgtatagttttttttttttttgagaaatttagttgttttggttattttgaattttttttttattttttttagtttagtgaggttgttggttttgtttggattttatatttttatattgtagtttagaagttgtttttaggaagaaggtttgggtgataaaagttggtgtaaaagtaattgtaggttttgtaattaaaggtaatgataaaaattataattatttttgtattaatttaatagtaggttttaaataatttgtttttttttttatagaaattatagttttgcgttgtttgttgtttaatgtttgaatattgttattttttatattttttttagttttttaggattttttttttttttttttttggaaagggagttttattttgttgttaggttggagtgtagtggtatgatttcggtttattgtaatttttgttttttgggtttaagcgattttttttgttttagttttttaagtagttgggattataggtgtttgttattatattcggttaatttttttatttttattttttatttttagtagagatggggttttattatgttggttaggttggtttcgaatttttgattatatgattcgtttgttttggttttttaaagtgttgggattataggtatgagttatcgtgttgggtttagttttttagttttttttttttttataatgggagagttgttttggaagtttattattttttgatgattggaatttttttttttttattttgaatgtatttaaaataatagtgttttttgtataattgaaagtgtttttttttttttttaaagggggatgttgggtagcgagtagagggagaaatttttatttttttggttttttgtttttttatggaataaggagtgggttatttgattggtgaatttgggagaaggaatagagtatgtatagttattttttttttttttttttttgggttttttttatttttagagagtatgtgttttttattgtttttggttatatggtaaggtatttgatagttgtgttttttaattggttttatacgtggtgtagaagagatgtattttttttttttgagatagggttttattttattatttaggttggagtgtagtggtatgattataatttattgaagttttgattttttgagtttaagttattttgttattttattttttacgtagttgtgttattggaaaggggttttgatttagattttaaaagagcgtttttggattttatataagaaagaattttaggtgagtttataggataaagtgaaagtaattttattagagaaataagtaaataaatgaatggttattttataggtagagtagttttgagggttattggttggttatttttagggttattttttgattatatgttaaataaggggtggattatttatgagttttttaggaaaggggtaggtaatttttagaattgagggttttttttttttttggattatatagggtatcgtttggatgttgttatggtatttgtaaattgtgatggtgttggtgggagtgttttttagcgttttaatgtattatagttagttagtatataatggatagtgaggatgattagaggttatttttattgttatttgggttttggtgggttttggtgggtttttttattgtattttattttattagtagggtttttatgatttgtattttgtgttattaattttgtcgaatttttattttattttgtgattaagaatgtttaattttttgggaatgcgatttagtaggttttagttttatttgatttagtttttattaaagatggagttgttttggtttgaatgtttttgatagttggaattaagtgaaggatttttgagtgatgtttttttttttagttatgttgtaatgtcgtcgttatgttatgtatagaaataagaaaatattgtttttaatgtttttaattatttttgtttatggaaatgtattcggtaagaagttatgagattataataatatattagttgttaggattttgtttttaattaagatggaggaatagggattagtaaatagtaaatgtttttttgtttttaattaataaaaaaatttgataaattaggtttgtatgataattgtttttagatattggataataagtagtttagaatagttgtttttgagagaggtaagtaaatagaatgagttttatgaattagtttattttttggagaaaatttgtaggttgtagaatagggagaggggatttatttagagtttagaagtttttttgggttgaggaaataaagttgggagtttggggagatttaggtggtaagagtttatagggtagaggattggagaggagagagttgtatagaatattggagatttgtagggggttttgttattaatagaatttttaggtgagtagtggttgatgtatatatttggtgaaagaatttagatgatttatagagtttatataggttaggaatagtttatttttttattagttatagtgaagataaaatttatagtatttagggtattgggtagagaatttagaaagattatttgagaggaaaaattagtagtatttttgtttttatttaataaaatttaaaagttaagttttgaaaagtaatttattgtgatttagaaaaaagtttaaaaataggtcgggtgtgatggtttacgtttgtaattttagtattttgggaggtttaggagggtagattatttgaggttaggagttcgagattagtttggtcgaaatatagtgaaagtcgtttttattgaaaaatataaaaattagttgggtgtggtggtgtacgtttgtagttttagttatttaggaagttgaggtaggagaaatatttgaattttgaattaggaggcggagtttgtagtaagtggagatcgcgttagtgtattttagtttgggcgatagagtaagattttattttaaataataataataataataataataataataattattattattattattattattatttattatttcggtattttgggaagttgagggaagaggattatttgaggttaagagttcgagattagtttgggtaatatagtgagattttaattttataaaaaaaaaaaaaaataataataataatagtgtataaagtaataattatagtatgttaaagatatagggatgggtaagtgtttaacggaatagaaaacgagtttaaaaataatttatgtatatttgaaataatatacgatagagataatataattagtggggaaagaatgaattatttattaaatggtattataaaaaaataaaattagattattattttatattaattataaaattatattttaagtaattaaataggttaggcgcggtggtttatatttgtaattttagtattttgggaagttaaggcgggcggattataaggttacgagattaagattattttggttaatatggtaaaaaaaattttatttttattaaaaatataaaaattagttgggcgtggtgacgtatatttgtagttttatttatttgggaggttgaggtaggagaatagtttgaatttgggaggtagaggttgtagtgagtcgagattacgttattgtattttaggttggtaataaagtgagattttgttttaaaaaaaaataaataaataagtaaataaataaaattttagaaaaaaataagaatatttttttgattttaggataagaaaagagttttaaagaagaaataaaagaggttaggtgcggtggtttacgtttgtaattttagtattttgggagattagggcgggtagattataaggttaggagttcgagataagtttggttagagagtagtttagttaatatgggaaatttcgtttttattaaaaatataaaaattagcggggcgtggtggtgtaagtttgtcgttttagttattcgggaggttgaggtgggagaattatttgaatacgggaggtagaagttgtagtgaattgaaattatattattgtattttagtttgggcgatagaatgagatcgttttaaaaataaaaaagttaatttataaaattagatatataaaagaatggtaaagattataaaattttattagtaatttggaaagtgtaaattaaaatggtaagaaaatagaattttatgttcgttagattggtaatatgaaaatatttgattaaattaagtgattaggaggatataaattgtataagtggtaatattagttggtatattcgttttaggagagtaatttgtaatcgtttatagaatgaaaatatttttggtcgggtacggtggtttacgtttgtaattttagtattttgggaggtcgaggtaggcggattataaggttaggagatttagattattttggttaatatggtgaaattttatttttattaaaaatataaaaaattagttgggcgtggtggcgggcgtttgtagttttagttattcgggaggttgaggtaggagaatggcgtgaatttaggaggcggagattgtagtgagtcgagattacgttattgtattttagtttgggtaatagagtaagatttcgttttaaaaaaaaaaagaaataaagaataaatttgaataatggttttggaggttttgtatgtattgtttatttttgtaatattttttattttttattttttatttttttgtgttttgtatttttatttgtgttttttttttagttttttaaatatatttattttaggatttttgaatattgttttttttatttggaatttttttttttttgttttttatttttaatttttttgtttagtgaattgttatttatttttttagattttattttaaatgttatttgtttagggatgtttttttagattttttaatgtttttgtattttgtttttaaattagttgtaagaatttgtagttgggtttagtggtttacgtttttaattttattattttttggagttaaggcgggcgaattatttgaagttaggagtttaagaattagtttgattaatatagaaaaatttttatttttattataaatataaaattagttaggtatggtggtatatgtttgtaattttagttattcgtaaggttgaggtaggagaatcgtttgaattcgtgagatagaggttgtagtgagttaagatcgtattagtgtattttattttgggtaataaggggaaaatttcgttttaaaaaaaaaaaaaaaattgtaggtcgggcgtagtggtttatttgtaattttagtattttgggaagttaaggcgggtggattataaggttaggagttttagattagtttggataatatggtgaaatttcgtttttattaaaaatataaaaattagttaggtatggtggttcgcgtttgtagttttagttatttcggaggttgaggtaggagaattgtttgaattcgggaggtggaggttgtagtgagttaagatcgtattattgtattttagtttgggcgatagagtaagattttattttaaaaaaaaaaaaatttgtaattataggttaggtatggtggtttacgtttgtaattttagtattttgggaggtcgaagttggtggattacgaggttaggagatgaagattattttggttaatacggtgaaattttgtttttattaaaaatataaaaaattatttaggaggttgaggtaggagaattatttgaatttaggaggtagaggttgtagtgagtcgagattgtattattgtattttagtttggatgatagagttaaatttagttttaaaaaaaatataaaataaaaaataaaaataaataaaaaaaaagattttttaaaagaaagaaagaagaattattttttttttttttttggggataggggagggggtcggtgtaagttattagatttaatcggaggtattcgggacgggggcgcgttgtatttattcgttaggttgttcgcgtcgtggttttggaaggtttgaaggtcgtcgatgcggtagagggcgttcgtgtgttattatttttgcgtcggtagttcgcgataacgcggcgttcgtacgattatgattacggtattagtaagtatgtcgagttagtcgagttagaagagtagtagtagtgtttagcgggtgcgtatttagtcggggttgtttgttatttttagtagtttttttttggataggttcgtgaatttagtcgcggttgtcgttttcgtttcgtttttcgttattttgatttttattagattatttttttcggttttcgttagggatatggtcgttttagacgtcgcgtttatcggttgtttttcgggttttaatttatttagttttattttttttatatttatttcggtgttttggtttatggtgtttgtagaatcggcgatacgacgtagtttgcggttagatggtggtttaatttttatttggattttcggatttagaacgtttttttcggtttttgtgttttcgcgtagtttcggttattgtatttgtttagtagtaggcgcggtttttgggaaggggtagcggagtttcgtttcggttcgttttttaaggtggaatttcggggattgttttagtcgtgggcggtttagggtagtaaagttaggaatacgttttcgatagtattttttgtatggtttaattttttatttttaatttgtttaattttaaagttttttttaatttgattttgggaaggtttggtacggagttatttttaagtggattaggtttgtgattttgttttaaatttcgaggtttttttagtgttttttaggttttatcgtttttaaacgtttttttttttttatttcggtaggttagtgattattttaatattattttttatttgtttttggtttacggtttcggtcgtcgtttggtttttttaattttgtatggttatttgtatttttagaggtagttagttataatttttgtttttttttttattaaggtttgtttttttaggtttttgggatttggcgttagatttttgttagatttttgttttcgtgtacggtttatttttattcgttttttaagatttattttgaatttattttaagaaattttttatgtagtaattatttattgtgtatttattataatattttgttttgttaattttattgaatttaatattaatttagttttttttatagtattttaaaatgaatggtttgggtaggaaggttgaggtagatatttttttttttattttattttatttttagttgttagtatttggatgtttggtagttaggaattagatatttagaagagattgatagggttgtaatgaatataatagagttaggttttagaggtatttattttttttgtggaatagattagaagatgttatggttagatttttatttattttgtaggaatttttatagttatttttaaatttttttaaggttttgtttttttattattttattatgttaggttttggaggtagttggtattgtagaggttttgaagaagtttagaattttttttatagggtttttggattgaagtggggtagagatagggtttatagtagggaattatcggatattaatatcgtggggtgttaatatttttaggaattttttgtttttaaatagtgttagttgggttatttttagagaggagttggaggaaatcggtttttttttttttttttatttaggttggaagttaagattgttgtgtatttggaagaaagtaaaagttaagatttgaagtaatagtatagagaaaagggttattttttgttagttttttttgtaattttaggtatttaattttatttttattttaggaataaggggtgtacggggtagtttttgggagaaggtaagtaagtgggtttagattagtgtttaaagataataagagatttaaggtgttttgtatgtgttagataagaagtgttaattagaggttttgaatggattatatttcgagtataaaagtttaaggttgggcgtagtgtgatttatgtttgttatttagttttttaggaggttaaggagggaggattttttgaggttaggagtttaagattagacggggtaatatagtgagattttatttttaaataaataaaaaaataaattttaaaattatttgggtttggttgggtgtggtggtttatatttgtaattttatttattaatttttgtaattttattttttatgttgtggtatgagaatcgtttgaatttaggaggtagaggttgtagtgagttaagaatgggttattgtattttagtttgggtgatagagtaagattttgttttaaaaaaattaataggttaggtgtggtggttgatatttgtaattttagtattttgggaggttgagggtggcggataatttgaggttaggagttcgtgattagtttggttaatatggtgaaattttatttttattaaaaatataaaaattaattggatatagtagtatacgtttgtagttttagatttggaggggtgaggtatgagaatcgtttgaattcgagaggtagaggttgtaggttgtaataagttaagattgcgcggttgtattttagtttgggtgatagagtgagatttcgttttaaaaaaaaaagaaagaaaagttttgaattttttttttggatgttttgatttagaaggtttgggatgggatattagaatttatgtaataagtttagttaagaataagagaaagaataaaaaaagaataagaggtcgggcgcggtggtttacgtttgtaattttagtattttgggcggtcgaggtgggaggattatgaggttaggagatcgagattattttggttaatatggtgaaattttatttttattaaaaatataaaaattagttggtatgatggtgtatatttgtaatcgtagttatttagaagattgaggtaggagaatcgtttgaattcgggaggtagaggttgtagtgagttgagatcgtgttattgaattttagtttgggtgatagagtaggtttttttttttaaaaaaaaaaaaaaaaaaaaaatttattatttcggtatattgggaagttgagggaagaggattatttgaggttaagagttcgagattagtttgggtaatatagtgagattttaattttataaaaaaaaaaaaaaataataataataataatgtataaagtaataattatagtatgttaaagatatagggatgggtaagtgtttaacggaatagaaaacgagtttaaaaataatttatgtatatttgaaataatatacgatagagataatataattagtggggaaagaatgaattatttattaaatggtattataaaaaaataaaattagattattattttatattaattataaaattatattttaagtaattaaataggttaggcgcggtggtttatatttgtaattttagtattttgggaatttaaggcgggcggattataaggttacgagattaagattattttggttaatatggtaaaaaaaattttatttttattaaaaatataaaaattagttgggcgtggtgacgtatatttgtagttttagttatttaggaggttgaggtaggagaatggcgtgaatttaggaggtagaggttgtagtgagttatgatcgtgttattgtattttagtatgggtaagagagtgagattttgttttaggaaaaaataattaaaaagttaaaaaaaaggaaaaataattgtatatttagaattttatatttagagaaaatattttttaaaaatgaaggtgaggtcgggtatagtggtttatatttgtaattttagtagtttgggaggttgagataggcggattatttgaggttaggagtttaagattagtttgattaatatggagaaattttgtttttattaaaaatataaaattaatcgggtatggtggtatgtgtttgtaattttagatattcgggaggttgaggtaggagaatcgtttgaattcgggaggtagaggttgtggtaagttgagatcgtattattgtattttagtttgggtaacgagagaaattttattttaaaaataaaaaaagaaatgagattgggataatatggagaaatggaggagaaggttagaatgattgaggtttggttttttatattttttttgtatattaatgatttagattataaggtttttagtaagaattttttttttaagttttagaggagtttgtagtgagtcgagattatattattgtattttagttggttgatagagcgagattttattttaaaaaataaaaaaagaaaaagaaaaaaaaaaagaaaattatttggttatagtgttttagtttttttttttgtaaaagggaatattaaaagtatttatttattttttaaggttgttaatatatataaagtatttgtaatggtgtttggtattattgattagtaggttagagattttgagttagttattattagagaatagagggaaggaaagttagggttttatatgggatattttagtagagtgtgaatagagggagaaaatgtaaatatttggttaggtatggtagtttatggttgtaattttagtattttgagtggtgaaggtaggagggttgtttgaggttaggagtttaagatttgtttgggtaatatagtaagattttatttttataaaaaattaaaattagttaggtatagtggtgtatgtttgtagttttaggtatttgggaggttaaggtatttgagagggtggtttgagttcgggaggttaaagttaatttttagagaattagggagtagataaaattagtaagggtaaggttgatggttaataggtaagttagtgttttttttgtatttttatttatttatttatttatttattttttggagattaagttttgttttgtcgttagggttggagtgtagtggtacggttttggtttattataatttttattttttagttgtaagcgagttttttgttttagttttttgagtagttgggattataggtgtgtgttattatgttggttaatttttgtatttttagtagagaggggattttattatgttggttaggttggtttcgaattgttgattttacgtgatttattcgttttagtttattaaagtgttgggattataggcgtgagttatcgtgtttagttattagtgttttttttttaggatttgtttaattttaagttagagttattagtgatagagtacgagtattgttattttggataagtattgttattttaagtttattttgattaaaaattgtttaaatttaaagggtattaatttaatggttaaagttattatgattataaattataaatgatatttttatttagaaatattttatattttttttcgattagagatatgttagtttcgagat

SEQ ID NO: 113 - DNA, 6184 bp, Artificial Sequence
  chemically treated genomic DNA (Homo sapiens)
ggtggtggtttatatttgtaatattagtatttcgggaggtcgaggtcggtagattagttgaggttaggagttcgagattagtttggttaacgtggtgaaattttatttttattaaaaatataaaaattagttaggcgtggtgatgggtgtttatagtcgtagttatttaggagattgaggtataaggatcgtttgaatttgggaggtggtgagttgagatcgtgttattgtattttagtttggataatagagtgatattttgttttaataaataaataaatagaagaagaattaatttttaaaaattaaagatatatggaaggttttcgtaggaggttgggagttattaagggttaggttgaaatgtgtaacgtggttacgtgggtttttcggaaatggttagaatatggttattttttgaggttttattggtgaaataaacgggaaatatggaggttgttttagtagtgagttttttattttttttttagtttagtttgtggtttttaaaagatgtttttcgtggtatttggatataatttagaaggtttttttaattaatttaatttttattttggaggttacggttttttggtgttagttttagagggtttgtagaatattatggaaatttatatttggagttaaagaatggtagcgttaaaaaaaaataaagaaaaaaggtaaaaggtatttaattaaatgaattagaaatagaagttttttaaatgtttatttgtgagaatatagataaaaagttttaaagtttggtttttagaagttgatgttgtatttttattatggttggcgagaatgatttgcgttttttttgaaaggtagttagagtttagattttattggaatataatggatagttagaggagggaagttttatttgtagtgtcgtttaaatgttagaggttggagatggtttaggggagggttttttttttggcggtaatgggggtgaagtaggaagtttatagggagaggggtgtttggagtgtgagatagtaggaagattttgcgttttttttatttttgttttattttaagttagatttgttttaggatgttaaaatgttcgggtagttttagtatttttttgttttttaaaatgagtttttagggtttttttatttgttttgatttaggatttatatttttttttgattttagtttaggattgtggttagggaaaaagaaagtgttaattgatagagagttaatgttacgtggggaggtcgggggagaggtgtaggagaaaatattagagaaggagttttggttgggtagtttattcgggtttattttaagaggtaatattttaaaggtggtgtttttatgaagaacgattatattttttttatatttttaaagtgtaattatgttgttggggttttgttggtcgaaaagaaaacgaaaaagaaaagaaaaaatttttcggtgtgtaagtttatattgttattttttaagatgtgtattatttatattatcgagtttatattgttgagtaggtttttggggtataggtttagtttttttagttttgtaggtttttgatttaggggtgtaggtgatttagggaggggtgggtatggtcgtaggtaggggatagtttaagattatttgatttagtaattttattattaggtatatatttaaacgattataaattattttattataaagatatatgtatacgtatgtttttgtagtattagttataatagtaaagatttggaattaatttaaatgtttattaataatagattggataaagaaaatgtggtatatatatattatggaatatacgtagttataaaaaaggatgagtttatgttttttgtagggatacggatgaagttggaaattattatttttagtaaattattataggaatagaaaattaaatatcgtatgtttttatttataagtgggagttgaataatgagaatatatggatatagggaggggaatattatatattagggtttgttggggggtggggtgtaatgggagagagagtattaggagaaatatttaatgtagatgatgggttgatgggtgtagtaaattattatggcgtgtgtatatttatgtaataaaattgtacgttttgtatatgtattttagaattttttttttttttttttgagacggagttttgtttagtcgtttaggttggagtgtagtgttacgatttcggtttattgtaagttttgtttttcgggtttacgttatttttttgttttagttttttgagtagttgggattataggcgttcgttattacgttcggttaatttttttttgtatttttagtagagatggggttttattatgttagttaggatggttttaattttttgatttcgtgatttatttgtttcggttttttaaagtgttgggattataggcgtgagttatcgcgtttagtttgtattttagaatttaaagtataataataataataataaaaagataggtgttattttagatttttgatttagtcggttgggtagtaagtatgttagtttaggaatgggttaatagatgaggtagggttttgtaaattaaaaataaaattttttaagaggttggagtgggtggattatttgaggttaggagttttagattagtttggttaatatggcgaaattttatttttattaaaaatataaaaattagttaggcgtggtagtaggtgtttgtaattttagttatttaggaggttgaggtaggagaatcgtttgaatttgggaggtggaggttgtagttagttgagatggtgttatagtattttagtttggtcgagagagtaagatttcgttttaaaaattaaataaattaataaaataaaataaaattttaagtttttatcgttttttatttttaaaatatttgaatggattttttttttagttagagttttttaaaaatttaatttgagagagtgttttaagtcgtgacgggaagtaggggttgaatatgtttttcggtgttttttcggcgttaatatttatatagtttttaagtttgagaagaaatattttataattttttttttttgattttagtatcggaagggtttttgtttaaataagaatttgagtttttataattttttattttaatttagatatttttttttattgattttaggattttaaagaaatttaagtaattgttaattagaaaattttaaaatttatttataagttggaagttttttgttttgggttgtttcgtttttttggataaaattaatgtgttttttaaattttattgatgttttatgtttttttaaaacgtataatattaagttgtatttcgattattttgaggatacgttttcgggattttttgagggttgtgttatgggttatggttatttatatttggtttagaataaatttttttaaatatgttagagttggattttttttttttttttttttttttttttttttttttttgagacggagtttcgttttgttatttaggttggagtgtagtggtttgattttggtttattgtaatttttattttttcggtttaagcgatttttttgtttcggttttttgagtagttgggattataggtgtatattattatacgcgtttaattttgtattttagaagagatagggttttattttgttggttaggttggtttttaatttttgattttaggtgatttattcgtttcggttttttaaagcgttgggattttaggcgtgagttatcgcgttcggtttagtttgatttttttcgtggatagtttgaagtgtggaatgtaagaatatttagggttatttgttaggttgtaaagttgttttattattttgcgggaaaatggatataattttaggtttaggtgttaatagataatattgttaagtgtgggaagggcgataattgtattgtagttgtggttagtggcgcgggagggtgtttaaatttaaagtttattggaaggcgagtcgtttatgattaggattagggtttaggtgttttagatagaaggtatttcgttttttattgttttttattaattttcgtgattaggagtttttatttttaattttgttttggggattttggggagaaattgttttagcgtagaggttattttaagggttgtttttggttcggcgtaaagggttcgttcgttattttttcggttgcgtatttcgcgttcggacgttttagaaaggatttgggacgggggttgtttgtggagcgggggtttaggttttttgagtagggagaggattgtattttgttttttttggggaattttttgaggtgagtagcggggaggggtttttatattttttttagtaggggagtcgggagttttttttgtttttattgtagagtaggggagggtttttgttaggggcggagaaggggttgtaggggcgagtggggaggggggttatacgtttttaagaagggcggtagtttcgtgtcgttatagttgtaggcgtgtatttaggaggttgtagatagggagggattcgtattttttcgagtaggggagttgttgggaaagtttgtttttttgtttttattggagattagggggtgaggggcggagaagtggttgtaggggcgagtggggagagggggttttatgtttttaagaagggcggtagttttgtgttattatagttaagggtcgttttcgggcgtgtatttagagggttgtaaatcgggagggattcgtattttttcgagaacgttgtagtttattttgtttcgggtcggcgtcgttttggttacggttttgtgggtgggtgagggggcgtgggtagttttttgagaaggggcggggcgtgtatcgtatttttttcggcgttgtttgggttattttcgttcgtttattttttttgtttttttttcgggttcggcgttttcgttttttttgtgcgcgcgtggaggtcggggcggggcgggcgtagtcggcgttgagtttgtagggtcgttttttttattcgtttttttcgagttttcgggtttcgttttattcggttcgtgggggagtatttgttttgtcgttttcgtttacgttttgtatttcgggatcgtttttgcgcgttttgggcgtattatggttcgcggggttgcgttggcgttgttgtttttcggtttgttgggtgttttggtcgtcgtttcgggtgagcgagcggagggattcgggttgggggacgcggagggcgcgggtcgggattggggattcgtttgagatgcggcgttgggggcgtttcgcggggatattcggagttttttttttgttcggtaggacgcgttgtgtttacgggggtttaggttcggaggaggcgtttattttttttttaacgttttttttggagtcgttttagagagaaaagttagcgtttgttgtcggagttgtaaatttttatatgtggggcggttttgggagaggtgcgttcgattttttttaatttaggggatttttttatagatttttttttttttgtatgagttttttattttatttcgttatttatttttagggtttggggatttgcgtttttaggtcgcgcgcggaggtcgttttggagttgtttgttatagttacgttttgcgtttcgggtttaaatttggaatcgttaggagtttgagattcgggtggtggggggaagggaaggaaaagttagaaaaaaattttgagttttgaaaatgtttaaaaatattttgtggatgcgggtttcgggaattttagcgcgtgttgtgcgttaagtaatacggggcgtagaaagaaacgtgtgtttattaaattgtttatttgcggcggtggagaattcggaaaatagaaaaagtgggtagggaagaaagagttacggttatttttttacgttttaaatcgggtttatttttaattattattttaattatgtttttttgtttttttttttttgaaacggaaacggagattttgtcggatgtggtatgttataaattttttttttatgttataaattttttttttaatggttagtgtattttttgtttttcgtatgggtaggtttttaagtagatcggtttgcgggtagtgtggattttaggacgggttttattagggttggacgtatttaggaaggagacgcgggaacgttcggttttggggaggacggaggaggttcgatttgtgtt

SEQ ID NO: 114 - DNA, 6184 bp, Artificial Sequence
  chemically treated genomic DNA (Homo sapiens)
aatataaatcgggtttttttcgttttttttagggtcgggcgttttcgcgttttttttttaaatacgtttagttttgataaggttcgttttgaagtttatattgttcgtaagtcggtttatttaaaagtttgtttatacgaagagtaaaaaatgtattgattattgaaaaaagaatttataatatgaaaaaagaatttataatatattatattcggtagggttttcgttttcgttttaaagggagggaaatagaaaaatatgattaaagtaataattagaaataggttcggtttagggcgtgggagggtgatcgtggtttttttttttttgtttattttttttgtttttcgaattttttatcgtcgtagatggataatttggtaagtatacgtttttttttgcgtttcgtgttgtttggcgtatagtacgcgttgaaattttcggagttcgtatttatagagtatttttgaatatttttagggtttaaagtttttttttaattttttttttttttttttttattattcgggttttaggtttttagcgattttaaatttaggttcgggacgtagggcgtggttgtgataggtaattttagggcggttttcgcgcgcggtttgaagacgtaggtttttaaattttgggggtagataacggggtggggtgaggggtttatgtaaagggagagagatttgtaagaaggttttttagattgggaaaaatcggacgtattttttttaaggtcgttttatatgtaagagtttgtaatttcgataataaacgttgatttttttttttggaacggttttaggaaaagcgttggggagaaagtgggcgtttttttcgggtttgggttttcgtgggtatagcgcgttttgtcgggtagggaggaggtttcgggtgttttcgcggggcgtttttaacgtcgtattttaagcggatttttagtttcggttcgcgtttttcgcgttttttaattcggattttttcgttcgtttattcggggcggcgattagaatatttagtaggtcgaagagtagtagcgttagcgtagtttcgcgggttatggtgcgtttagagcgcgtagggacggtttcggagtgtagggcgtgggcgaaggcggtaggatagatatttttttacgggtcgggtggggcgaagttcggggattcgaagggggcgggtgaggggagcggttttgtaagtttagcgtcggttgcgttcgtttcgtttcggtttttacgcgcgtatagaaggggcgggaacgtcgggttcggggaggagatagagggggtaggcgggcgggggtggtttaggtagcgtcgaggggagtacggtatacgtttcgtttttttttaggaaattgtttacgtttttttatttatttatagggtcgtagttagggcggcgtcgattcgaagtaaagtgaattataacgttttcgggaaagtgcgggtttttttcggtttatagttttttgaatgtacgttcgagggcggtttttaattgtagtggtataaaattgtcgttttttttggaaatatagagttttttttttttattcgtttttgtagttattttttcgttttttattttttggtttttagtgggagtaaaaaaataaatttttttagtagtttttttgttcgggaaagtgcgggtttttttttgtttatagttttttaaatgtacgtttgtaattgtagcgatacgaaattgtcgttttttttggaaacgtgtagtttttttttttattcgtttttgtagtttttttttcgtttttagtagggatttttttttgttttgtagtgggagtagaggaaattttcggtttttttgttgggaaaagtatgggggttttttttcgttgtttattttagggagttttttaaggggagtaaagtgtaattttttttttgtttaggaagtttaggttttcgttttataggtaattttcgttttaagttttttttagagcgttcgagcgcggggtgcgtagtcgggagggtggcggacgaattttttgcgtcggattaaggataatttttggagtagtttttgcgttggggtagtttttttttagaatttttaggataaggttgggagtggggatttttggttacgggagttagtgaggggtaatagggaacgaggtgttttttatttggggtatttgggttttagttttggttatgggcgattcgttttttagtgggttttgagtttagatattttttcgcgttattggttatagttgtagtgtagttgtcgttttttttatatttaataatgttatttgttaatatttaagtttaaaattgtatttattttttcgtagggtagtggaataattttgtagtttgataaataattttgaatatttttgtattttatattttaaattgtttacgaaaagagttaaattaggtcgggcgcggtggtttacgtttggaattttagcgttttgggagatcgaggcgggtggattatttgaggttaggaattggagattagtttgattaataaggtgaaattttgttttttttaaaatataaaattagacgcgtgtggtggtgtgtatttgtagttttagttatttaggaggtcgaggtaagagaatcgtttgaatcggggagatggaggttgtagtgagttaagattaggttattgtattttagtttgggtgatagagcgagatttcgttttaaaaaaaaagaaagaaaaaagaaaaaaagagaaaggagtttaattttaatatatttgaagagatttattttgagttaaatatgagtgattatggtttatgatatagtttttaggaggtttcgagaacgtgtttttaaggtggtcggggtgtagtttggtgttatacgttttagggaggtatgagatattaatgaaatttaagagatatattggttttgtttagaaaggcgggataatttaaagtaggaggtttttagtttataggtagattttagaattttttgattggtaattgtttgggtttttttaaagttttgggattaatagaaaagaatgtttgggttaagataaagaattgtgaagatttaagtttttatttgaataggaattttttcggtgttagggttagagagaagaggttgtaaaatgtttttttttaaatttaaaggttgtgtggatgttaacgtcggagaggtatcgggaggtatgtttaatttttgtttttcgttacggtttgaaatatttttttaggttaaatttttaaagagttttggttgaggaagaagtttatttagatgttttgaaggtggggggcggtgggggtttagaattttattttattttattaatttatttagtttttgagacggagttttattttttcggttaggttagagtgttgtggtattattttaattaattgtaatttttattttttaggtttaaacgatttttttgttttagttttttgagtagttgggattataggtatttgttattacgtttggttaatttttatatttttagtagagatggggtttcgttatgttggttaggttagtttggaatttttgattttaagtgatttatttattttagttttttaaagaattttatttttggtttataaagttttgttttatttattggtttatttttgggttggtatatttgttgtttagtcgattgagttagggatttgagataatatttgtttttttattattgttattattatattttaagttttggggtataggttgggcgcggtggtttacgtttgtaattttagtattttggaaggtcgaggtaggtggattacgaggttaggagattgagattattttggttaatatggtgaaattttatttttattaaaaatataaaaaaaaattagtcgggcgtggtggcgggcgtttgtagttttagttatttaggagattgaggtagaagaatggcgtgaattcgggaggtagagtttgtagtgagtcgagatcgtggtattgtattttagtttgggcgattgagtaagatttcgttttaaaaaaaaaaaaaaaaagttttggggtatatgtgtagaacgtgtagttttgttatataggtatatatacgttatagtggtttgttgtatttattaatttattatttatattaggtattttttttaatgtttttttttttattgtattttattttttaataggttttggtgtgtgatgtttttttttttgtgtttatgtgtttttattgtttaatttttatttataagtgagaatatgcggtgtttggttttttgtttttgtgatagtttgttgagaatgatggtttttagttttattcgtgtttttgtaaaggatatgaatttatttttttttatggttgcgtatattttatggtgtatatgtgttatattttttttatttagtttattattgatggatatttgggttggttttaagtttttgttattgtgattagtgttgtaaaaatatacgtgtgtatgtgtttttatagtagaatgatttataatcgtttgggtatatatttagtaatgggattgttgggttaaatggttttgagttattttttgtttgcggttatatttatttttttttaggttatttgtatttttaggttagaaatttgtaaggttagaggggttgggtttgtgttttagagatttgtttagtaatgtgagttcggtggtgtgagtgatgtatattttaaaaagtaatagtgtgagtttgtatatcggaaggtttttttttttttttttcgtttttttttcggttagtaaaattttagtaatataattgtattttagaagtatgaggaaaatgtaatcgttttttatgggaatattatttttaaagtgttattttttggagtgaattcggatgaattatttaattagagttttttttttggtatttttttttgtatttttttttcgatttttttacgtggtattgattttttattaattagtattttttttttttttggttatagttttgggttggggttaagggagggtgtggattttaggttagggtaagtaggaggattttgggggtttattttgaggagtaagaggatgttggagttgttcgggtattttggtattttgaggtaagtttgatttgggatgaagtagagataaaaagaacgtagggtttttttgttgttttatattttaaatatttttttttttgtgagttttttgttttatttttattatcgttaaaagaaaggtttttttttggattatttttagtttttgatatttggacggtattgtaggtgaagttttttttttttgattgtttattatgttttagtagagtttagattttggttgttttttagggagggcgtaggttattttcgttagttataataaagatgtaatattagtttttgaaagttaggttttgaggttttttatttatgtttttataggtaagtatttggaagatttttgtttttaatttatttagttagatgttttttgttttttttttttatttttttttaacgttgttattttttggttttaaatatgaatttttataatattttgtagattttttggaattggtattaagaggtcgtaatttttagaatgaaaattaaattaattgaaaaagttttttgaattgtatttaggtgttacgggaagtattttttgaaggttataaattaggttgaagaagggatggggaatttattgttggggtagtttttatgtttttcgtttattttattagtggaattttaagaaataattatgttttgattattttcgagggatttacgtggttacgttgtatattttaatttaatttttggtagtttttagttttttgcggaaattttttatgtgtttttaatttttaagaattagttttttttttatttatttatttattgagatagagtgttattttgttgtttaggttggagtgtagtggtacgattttagtttattattttttaggtttaagcgatttttgtgttttagttttttgagtagttacggttataggtatttattattacgtttggttaatttttgtatttttagtagagatggagttttattacgttggttaggttggtttcgaatttttgattttaattgatttgtcggtttcggtttttcgaagtgttggtattataggtatgagttattatt

SEQ ID NO: 115 - DNA, 9510 bp, Artificial Sequence
  chemically treated genomic DNA (Homo sapiens)
  unsure (310, 626, 692, 746, 779, 1117, 1183, 1188, 1378, 1382, 1473)
  unsure (1523, 1935, 2923, 2931, 2943, 3423, 3690, 3707, 3842, 3856)
  unsure (4181, 4203, 4397, 4727, 4736, 4805, 4838, 5261, 5272, 5414)
  unsure (6104, 6313, 6694, 6698, 6836, 6851, 7445, 7457, 7501, 7512)
  unsure (7779, 7834, 7872, 8484, 8486, 8689, 8801, 8816)
ttgggattataggtatgagttattatatttggttaatttatgtgttattttaaggtgtttgtgtgtattgtttaataatttttagatatatatgtggttttatatttatttaattatgttaaggtttaaaaatgtgttatgaaaagtttttgagatttattgtagtttatttaatagtttggtatataattaatgtttataaatattttataggtgtttaaaaaaatatatagtttttaatttttgggtgaaatgttttatatatttttattggattattttttaatattgttatttagattttttatantttttattgatttgtgtatttgatatattaaatattgagaaaggtgtattaaaattatttattaatatgggtgattttatttttttaatttttatattattttttgtagtatttatttaaaatttatgatattagatgtaattaagtttagaattttattaatgttattagtttgttgaattgattaatttttttttttggtaaaattttagttttattataattttattatattagtaattttttatttatatttgtttgatatattttttgaattattttatttttaattatgttatagttttatgttttaagntgtgttttttttaaatagaagatagttgaattttgtttatttgtttgttttatgttaatttgtgtntttttaattggagaatttggtttaattatatttattgtaattaatatattttgnatttatttttagtattttatgttatattttttnatatgtttttttttaatattttttatttttttgtttttttttagattgatttatgtttaattttgttttttttttttgtaaaatttgattttatgtattttatttttattttttttgtggttgtattagtattttttatatatataattaatttaataaagtttaaagtatataattaattaatattattatttttttttttaataatataagtaaggattttattttatttatttagttagggttttattatgttgtttaggttggttttaaatttgggtttaagtgatttttttgttttagttttttgagtagttgggattataggtgtatattanttaggtttgattgagtaaagattttagagtgttttaattttaattaaatttttttagtttatatanttttngttgtttggttttttagttgattttttttattattatttttttatttttgttaatgtttgtttagatttatttatgttgttattatattttttgtttattatttttttttatatattagattttttataaattattattttgttttttaaatttatttttaagaagtttttttggttatagttagtggtngggnaagttttttaatttttattttgaatagtttagtttggattattttattatagatttttaatttggaaatatttaggttatataattagtantaaattttatttttatatttatttgaagtttggttaaattatgaattttntatagaaagtttttgttgtaagtttattagtttgagttaggattgaaaaaagtaagtatatttatgttttttgtggaagagtaggggtgaggagtcggagttggggttgagttttattttttgttagtttatatttttattttgttttggattatattttgtatgaagttttttggtatttgtaagttttgttaaagtgaaagttttaggtcgtttaagtttagtgaggttttttgaaatggatagatattattaggatagttattgtttttagtatttatatattttttttgatttttttgtcggtattataagaaagatattttgatttagattttaaaagagggtttttggattttttgtaagaaagaatttagaatgaatttataaagtgaaattaagtttattaggnaaagtaaaggaataaagaatggttattttataggtatagtagtagtataggcggtttgattgagtaaatttatagttatttttttattatatgttaaataaggggtagattatttatgagtttttagggaaaggggtagagattttttggaattgagggttttttttttttttaaattatataggttaatttttggatgttgttatagtatttgtaaattgttatagtattggtggtagtgttttttagtatgttaatatattaaaatttatatataatgagtagtgaggattattagcggttatttttatggttattttggttttggtaggttttggttggtttttttatagtattttgttttattagtatagtttttttgatttatattttgtgttaatcgattttttatattatcgtatgattaagaaggttttattttttgggaatttagtttagtaggttttagttttattttattcggtttttatttaagatggagttgttttggtttaaatgtttttgatagttttttttgtttttggtttttaagatttttttttatttgtttgttggtttaatggtgtatataaaaatgtattatagtatttttaaaggatttaaaaaaatttattaagtatttgtgttatatatagtggtttttaaggatttattttgtaaattgttagaattaatgtattttatttttaataatttatgtatggttattaggagggttatttttttttttatttttataagtggttaaattgagtgattttggattattttagtaagttttagttgtttaaatttatttattgtaaatagttggggattttttaagattttttaaaaaaattattttaaatttgtataaatttttgggaggagatttagtatttttgatttaaaaataaataaataaataataataataaaaattttaagtttttaattaattttaatgaaattaagatattgtaangggagatngtgggtagtttnaagttatttaagaggttgaggttgaaggattgtttgagtttagagttagagattagtttgggtaatatagttagatttttatttaaataaaaaaaaacgaataatagtaataataataaaaaatagaaagaaaagagaaaaagaaaaaaatatttgttttgggaaattagttattaatttatattgtcgattattagttgaaagttagagtttaaaattaattttaagtaggtatttttttttttttttgttatatattttaagtaaattttttttttttttttaaaagagtttttatcgttaggtatgattgttaatatttgtaattttagtattttgggagatcgaggtgtgtagattatttgaggttaggagtttgagattagtttggttaatatggagaaatttcgaaagtaaaagtatatatatatatatatatatatatatatatatacgtaagtaaaattagttcggtgtggntggtgcgtgtttgtatttttagttgtttaggaggttgaggtaggagaatcgtttgaatttaggaggtagagattatattattgtattttagtttgggcgatagtacgagattttgtaggaaaaaaaaattttagttgagatgttttttagggcgttagttaagtttcgtatgtttatttgtgggagtgaaaatattaatatttcgggattgttgtgaggattaaatagtgtttgtaagatgtatagagaaagcgtaaatagacgttnaatagtatttgttaggntttatatattttattttttttttatattaatcgaattatttaaagattggttagttttttggggaaatgtttttttattgtattttatttattaggatgaattattttttttttttgttttttagttttttttgnttatgaaaaagatnggaaaattttttagtataaggggattttttttaagtagtaaattattttgatattaaaaatagataattgtaaatttagttttattttagtatgaatttcgtagtggagtgtgaatatgtgtgtgtatgtgtgtgtgtgtgtgtgtgtgtgtgtgtgtgtaattatttgtgatttaaaagaggaaagggattagtattaaaggtatttgtatattggaagtaaaaaaaaaaggaagtttagtttttttgagttttttggtaattatagttgttaaaggtagtttttataaagaaattgtttttgtgtttaaagtatttatttttnttgtttgtatttatttttttgnaggaggaatcgttgtgttttgagtgaaaggggtacgttgtttgtttgtattaaattgtgagggtttaggcgtattacggttgattttagtaggtagagtagatatattttagtttattttttttttttttattttttatttttaattttcgatgtatatacgttttaagattttttgaagttaggaggtgggangcggagagttttagtttagattttgatatgagagtatttcgattaaggaaaagaaagggaagaaagagggaagcggggtggagaaagtaggagtaaggaaggaaagaaggaaacggggagggagagtaagaaaaaagaaaacgaaggagggagggagagaggatatttaaatgaagaaggaaggaagtttggatttagggaggaaagggagcgggaaagagagcgaaagaagagcgtgagaagaggtaagtattatagttttcggtttataggggagagatggagtttttttaggattagagaatttcgaagagttcgtgtattgttttntttgaaagntttcgaagttaagtaattttaaaaatgtttagtaaagtttttttgggaatggtgagatggggggtgggngaggatgggatatttttattgttatcgttcgtnttttcgttttttcggtttttttatatgaagtgattggatttgggagatttagcggaaatttttaggttatttagggaattgtttttttttttggttttgtagcggcgaggcggggtagggggtggggggggtgggtcgtgagagcgtcgagacgcgcggggcgcggagatgtgtaagtggcgaagtttgatcgagagtaggttggagtagtcgtttaatttttggcgcgggatttgttgaggggttacggtgagtttttgtgggtgcgggtcggagggatgtttaggtgtttcgtcgttttacggttcgggcggaggcgggttcggaattttttttaagttcggttttagtttggagttcgcgcgttttgggcggatgtacggattgagaggcgtttggttgggtttttagttcgttattgtntattcggtttncgtgcgtttattggtcgggatgtgtcggtttagtagtttttaatttttttcgaattttattggtgagttttaggagagcgagttgagggagaaaggtttaaagggcgcgagcgtttagggcgttgggagttcgtgggacggngtacggggagggtagagttagtcgaggggagcggttgtcgggaggtgcgttgagtagggttcgtagttaaggtttagcgcgattcgagcgtttaggattttgcggtcgtggaggaggcgtgttttgggaaggagtcgttattgggatttgaagagtgaggggagggagaggggtttagagggtgatttggaggagggttttggaagttacgttaggttggttttttaggtttatttttatagttttttgcggtttttgttttggggagttatgttttgttatcgagattcgcgttattagattgtatcggggttgatttgggggttgggaatttgttattttgttgtatagatattgattttttttttttttttttaaaaagtaaggtttgtttttattttggtttttgtcggatttttttatttgtaatttatttttttatttttattttttttaatcggaagatttttttattattttatttttttattttgtttttaatttgattttttattatataattaatgtttaaattttataagggttggtcggtgcggggttggtgtgtttttttgtagatgaaagtttaagattttttaattggttttagtttatttgtttggttttaaaataagggtaattgtaattaaatatttttttttagtttttcgattaagtcgattttttttnttatatatgatttaaatggtaattttattaaattgaaaattagtatttgatttgtagcgttagtatttggaaagtgtttgtcggtaaatcgattgtatgaaggcgtgtagttttattttttgttatttttgtgggttttagtattttaaaaaattgtttggtaattttttggatttaattttgtgtttttggttgtagagtagtattanattaggggagtaatatggttggtatttcgtgtttagaatttcgtattttaggttgggaaatatttaattaatgtttgggaaataagaagatgatttattttgagtatttttgtttttagtttttgtagatatagtttaaatatggaaattgtttttttttttttttgtgttttagtttttatagaataaattgtaattgtatagtatagttttaggaatttgtagatataagttaatgttataatgtgtagtgaagatgaaaattgtttagttaagtttaagtttgtaagttaatgagattttttttttaataaattagttatttaggttttttgttttgattgtttgatatagtaatgtttatgtttaattggtataagnaatntgttgttttatattgttttgaaattaagtttatatttaaaatagtaatttattttgttggtaatattgtcgagttgaagtttgtaggtttttgttattttagattttttaattttttattttcgtttgtggtagtgtnttattttttcgtttnaaattttttatttaatatatttttagttgaagtgaaatattttaagaatataggtatgtttttgcgtattttgttttatatgggattataagttttaatttggtattttttttttttttgtatttttttgtttatttgttttttttatttttttttatgggattgggtgtggttaagttggatatttaggtatttggggtttagttatatgttttatagtgagattttagatattgttttttgatgttttaaagaaaaattgtgaattttttagaattaattggaaatgaacgataaagttaattaggagattaaatttgtattatttttgtttttgtttaatgtttttgaaaaaaggttattaagagtaaaagattttttttaagaatttatagggtatttataagagggggagatggaggaagattttgtaggtgatttaaagattatattgttttgatgtagtttttgttattgtttttatttttttgtaattgtttttgtaaatttgggtgttgatttattaagagtttagttgttttagtatttagttttaagggtaaggaggagaagttaagggaaagtaatttatangggagaaagaanatgtttatttattagttttattatattataaggtatggagtttnttatagagtantttgtaatttaattttgaggttgttttggtttattttttcgttttattttatagggatattgattgttatttttaaggaagaattaagaaaaaaaaaagtttttttatattagtaaaatatttttatatattgttttttgatatatgcggggggaataatatttaggaaagggaaatattttagtaaatgtgtttaatatttaggtgttttttaggatagttatgaaatatggggagattgggagaattattattgtttattttttntgtaaagtgtttagagtattattaaatttgttttttttttttttttgtttaattnaatatattattaaaataggattataattaatgtaattnttatattataattttaggggtggtgagattaagttagtatgttttatataattattaagtaagatattttaatatttaggtatattatattttatttttatttagtagatacggtttttattgtgtaataaaatatttttatttgatagtttgtttttgtttatagttttatgtaattaaggggatagtatgtttaagattttgtatttagaattttaaggtttagttgtggttcgtttattaataatttattgggaaggttaatttttagttttttgttgggttttttagattatattttaaatgtagaatatgtttttttttttttttatgttttagtttttataaaatatatttttagagaattgtgtgtgtttaataaagatttttaattataagagtatttttgagtcgttattttattttgggattaaattttaagagtaatttgtattgagttataaatagttaatttgttagtttaagatgtttttttatatagttatgtagaaaaatggaaattgtgtgttttaatttttggagattggttgataaagtgttattaggtttttgatgaaatttaatatttaggtttatatttttttaattttntntttttaaatttttatagtacgtttttattgtatgatgatatagttttattttgaatagtgattaaatgtgttttttataaagaatattgacgagttgtgtagttttgaatacgttgtttgatttttttgtgttttagttttttaattttttattttattttgtggtagtgtttattttttggtttaaagtttttaatatattntttagttgaggtgaaagattttaggaatataggtatgtttttgtatattttgttttatataggattataagtattaatttggtaattttttgtattattttgtttatttatntttttttattttttnttttaaatgggattgggcgtggttaggttggatatttaggtattttttggtatagtgagtgattatttttagaatgttgtttaattagttaatagatattggtattagtagtagtagtaattttgaattgtaaaaataaaggttgtttttatgattaaaataaattattttatgtgtttattcgttttgttgtttatttatattaatattttaaattattgtttagttaaaattttaaggtattagttattggtttttgagtttataaaggaagttattggagtaagatataaaattaattattgatgttagtttagagtttaaaagggtgagtttaaaatttttttaatgatggtatagtaattatttgtttataaattgttgaattaattttatttgagtatttaattaagttttattgtttaattttgttgagatttttagtgatatattaaagtaaaataaaataaaataatagtaataaaaaataaaaggttgtgattgagatttgttaaatttatttggttttatatattttgtatttagtaataaaattttgattttttaatagtaaaaatgtatttttattttaaaataattgagttttttatttttatttagttatattaagtatttggatatttttttttttatttatttgttttttattattagtatttttattttttgtaga

SEQ ID NO: 116 - DNA, 9510 bp, Artificial Sequence
  chemically treated genomic DNA (Homo sapiens)
  unsure (695, 710, 822, 1025, 1027, 1639, 1677, 1732, 1999, 2010, 2054)
  unsure (2066, 2660, 2675, 2813, 2817, 3198, 3407, 4097, 4239, 4250)
  unsure (4673, 4706, 4775, 4784, 5114, 5308, 5330, 5655, 5669, 5804)
  unsure (5821, 6088, 6568, 6580, 6588, 7576, 7988, 8038, 8129, 8133)
  unsure (8323, 8328, 8394, 8732, 8765, 8819, 8885, 9201)
tttgtaaaaaatgaaaatattaataatgaaaaataaataaataaaaaagaaaatgtttaaatgtttaatgtggttggataaaagtaaaaggtttagttattttaaaatagaaatatatttttgttgttgagaagttaaaattttgttgttgaatgtaaagtatatagagttaaatgaatttgataggttttagttataattttttgttttttgttgttgttgttttgttttgttttgttttggtatattattgaaaattttagtaaaattagatagtaagatttggttaaatatttaagtaggattaatttagtagtttataagtaaataattgttgtattattattaagaaagttttaaatttatttttttgaattttggattaatattaatggttaattttatattttgttttagtggttttttttataagtttaaaaattagtgattaatattttgaggttttgattaagtaataatttgaaatattaatatagataaatagtaaaacgaatgaatatatgaagtagtttattttagttataaaaataatttttatttttatagtttaaaattattattattattgatattagtatttattaattggttagataatattttgaaaatggttatttattgtattaaaagatatttgaatatttaatttaattacgtttaattttatttaaganggggagtaagggggnataagtaaataaaatagtataaaaagttattaagttgatatttgtagttttgtataaagtagggtatgtaaaaatatatttgtatttttaaaattttttattttaattggangatgtgttaaaaattttaaattaaaaagtggatattgttatagaatagaataaagaattaggaaattggggtatagagaagttaggtaacgtgtttaagattatataattcgttaatattttttgtaaagaatatatttggttattgtttaaaataaagttgtattattatgtagtaaaagcgtattgtagaaatttaggggngnaaaattaaggggatataagtttaaatattaaattttattaggggtttagtgatattttattagttagtttttaaggattagaatatataatttttatttttttgtatgattgtataaaagaatattttaaattagtagattagttgtttatagtttaatataaattgtttttagaatttggttttaggatgaagtggcggtttagaaatgtttttatagttaaagatttttgttgaatatatataattttttaagggtgtgttttgtggaaattgaggtataggagaaagaagaaatatattttatatttgaagtatggtttgggagatttagtagaaaattagaaattaatttttttagtgaattattaataagcgaattatagttagattttaaagttttggatataaagttttaaatatgttgtttttttgattatatgaggttataagtaaggatagattattaaataaaaatattttattatataatgaaaatcgtgtttgttaaataaaagtggaatgtaatgtatttgaatgttaaaatgttttatttaatggttatgtaaggtatgttggtttagttttattatttttggggttatgatatggnaattgtattgattgtagttttattttaatagtgtattnggttgggtaaaggaaagaggggaataaatttaataatattttggatattttatangagaggtaaataataataatttttttagtttttttatgttttatgattgttttaaagaatatttgaatgttaagtatatttgttaaagtattttttttttttgaatattgtttttttcgtatatgttagaagataatgtatagaaatgttttattggtataaaaggattttttttttttttagtttttttttagaaatgatagttagtgtttttgtaaagtaaagcgaaggggtgaattagggtagttttagggttaaattataggntgttttgtggnaaattttatgttttgtggtgtagtaaagttagtggataagtatntttttttttttntgtaagttatttttttttggttttttttttttatttttgagattgggtattgaagtagttgggtttttaatgggttagtatttaagtttgtagaaatagttatagagaaatgaagatagtgatagaagttgtattaaaataatataatttttgaattatttgtaaagtttttttttattttttttttttgtaaatgttttgtaaatttttaaaggaagttttttgtttttagtagtttttttttaaaagtattgagtaaaagtagaaatgatgtaagtttaattttttaattaattttgtcgtttatttttagttaattttggaaggtttataatttttttttaagatattaggggatagtatttggaattttattgtggaatatatgattaaattttaaatatttgaatatttaatttaattatatttaattttatagagaagagtaagggggataagtaaataaaagaatataaaaaaaaaaaaaatattaagttgaggtttatagttttatataaagtagggtacgtaaaaatatatttgtatttttaaaatattttattttaattgaagatgtgttaaataaaaagtttnaaacggaaaagtggnatattgttatagacgagaatagagaattaggaggtttaagataataagaatttgtaaattttagttcgataatattattaatagaataaattattattttaagtgtaagtttaattttaaagtaatgtaaagtagtanattntttatattagttgagtataagtattattatattagatagttaaagtaggaaatttggataattgatttgttaaaaaggaaattttattgatttatagatttagatttagttaagtagtttttatttttattgtatattataatattaatttatatttgtaggtttttgaagttgtgttatgtaattatagtttgttttatggaaattgaggtataggaagaaggagaaatagtttttatatttaaattgtgtttgtagaagttgaggatagaggtatttaggataaattatttttttgttttttagatattaattaggtgttttttagtttgaaatacggagttttggatacgaagtgttaattatattatttttttggtntagtgttgttttataattaaagatatagggttaagtttaagaaattattagataattttttaaagtgttagaatttataaaaatggtaggggatgaagttatacgtttttatatagtcgatttgtcgataagtattttttaaatgttgacgttgtaagttaggtattagtttttagtttaataaaattgttatttgaattatatatggngggaggaatcgatttgatcgagaagttaaagagggatatttggttgtaattatttttattttgaaattagataaatagattgaaattagttaagaggttttaaatttttatttataaaaggatatattagtttcgtatcgattaatttttgtgagatttaagtattaattatataataggaaattaggttaaaagtaagatgaagaggtgggataatgaaaagatttttcggttaagaaaagtaaaaatagaaaagtgagttataaatgagaaaattcgatagaaattaaaatgaaaataaattttgttttttaaaaagaagaaaaaaaaattagtgtttgtatagtagaatggtaaatttttagtttttaaattagtttcggtgtaatttggtagcgcggatttcggtaataaaatataattttttaaggtagaggtcgtagggaattatggaaatgaatttgaagagttaatttgacgtgatttttagagtttttttttaggttattttttgggtttttttttttttttttattttttaggttttagtagcggtttttttttagggtacgttttttttacggtcgtagggttttgggcgttcggatcgcgttggattttagttgcggattttgtttagcgtatttttcggtagtcgtttttttcggttggttttgtttttttcgtgtntcgttttacgggtttttagcgttttgggcgttcgcgttttttggattttttttttttagttcgtttttttgggatttattagtgggattcgggagaagttggaggttgttgagtcgatatatttcgattaatgagcgtacgngggtcgggtgngtagtggcgggttgagagtttagttaagcgttttttagttcgtgtattcgtttaaggcgcgcgggttttaggttgaggtcggatttgggggaggtttcggattcgttttcgttcgggtcgtggggcgacgaggtatttgggtattttttcgattcgtatttatagagatttatcgtgattttttagtagatttcgcgttaggagttgggcggttgttttagtttgttttcggttaagtttcgttatttgtatattttcgcgtttcgcgcgtttcggcgtttttacggtttattttttttattttttatttcgtttcgtcgttgtaggattagagagaggagtagttttttgggtgatttgaaggttttcgttaggttttttaaatttagttattttatgtgagggggtcggggagacgggggngcgggcggtggtaatgaaaatgttttatttttntttattttttattttattatttttaaaagggttttgttaaatatttttagaattgtttagtttcggggntttttaagnaaaataatatacgggtttttcgggattttttagttttgagggggttttattttttttttgtggatcggagattataatgtttgtttttttttacgtttttttttcgttttttttttcgtttttttttttttttgaatttaagtttttttttttttttatttaaatgttttttttttttttttttttcgttttttttttttttatttttttttttcgtttttttttttttttttttgtttttgttttttttatttcgtttttttttttttttttttttttttttttggtcgaagtatttttatgttaagatttgaattgaaatttttcgtnttttattttttgattttagggaattttaaaacgtgtgtatatcggaggttgagggtggggagtgagaaagagaaaaataaattaaagtgtgtttgttttatttattgaaattagtcgtaatgcgtttggatttttatagtttaatgtaagtaagtagcgtattttttttatttaagatatagcgattttttttntaaaggggtaaatataaataanggaaataaatattttaggtataaaggtagtttttttgtaaaagttatttttagtagttataattgttaaggagtttagaggaattaaatttttttttttttttgtttttagtgtataagtatttttaatattgatttttttttttttttgaattataggtaattatatatatatatatatatatatatatatatatatatatatatatatttatattttattgcggaatttatattgaaataaaattgggtttgtaattatttgtttttaatattaaaatgatttgttgtttgagaagagtttttttgtgttaaaaaattttttnattttttttatagntagagaaagttgaaaagtaaggagaaaaggtagtttattttaataagtggaatataatggagagatatttttttaaaaagttaattaatttttaaataattcgattaatatagaggaaaaatggagtgtgtagantttaataagtgttattngacgtttatttacgttttttttgtgtattttatagatattatttagtttttataataatttcgaaatattggtgtttttatttttataaataagtatgcggggtttgattagcgttttggaaagtattttaattggaattttttttttttatagagtttcgtgttgtcgtttaggttggagtgtagtggtgtgatttttgttttttgggtttaagcgatttttttgttttagttttttgagtaattggaaatataggtacgtattanttatatcgagttaattttgtttgcgtgtgtgtgtgtgtgtgtgtgtgtgtgtgtgtgtatttttattttcggggtttttttatattggttaggttggttttaaatttttggttttaagtgatttatatatttcggttttttaaagtgttggaattataggtgttagtaattatgtttggcggtgaggatttttttaaaggaaaaaaaaggatttatttaaaatgtatgataaaagaaaaaaaaaatgtttatttagagttaattttagattttgatttttagttgatagtcgatagtatggattggtaattggttttttagaataaatattttttttttttttttttttttttttgttttttgttgttgttgttgttgttcgtttttttttgtttagatgagggtttgattgtgttgtttaggttggtttttaattttgggtttaagtaattttttagttttagttttttaagtagtttnggattatttatnattttttnttataatattttgattttattaaagttgattagaaatttagggtttttgttgttgttgtttgtttgtttgtttttaaattaagaatgttaaatttttttttagaagtttgtgtaagtttgagataatttttttaagggattttaaagagtttttaattatttatagtaagtaaatttagataattgaggtttattgaggtggtttaagattatttagtttggttatttataggaatggaggagaaagtagtttttttggtggttatatataagttattaagaatggaatgtattggttttagtagtttgtagaatggatttttaaaaattattgtgtgtgatataaatgtttgatgaatttttttaagttttttaaaaatgttatagtgtatttttatatgtattattgagttagtaggtaagtaaaagaaaattttagaagttaaaaataaagagagttgttagaggtatttggattagagtaattttattttgaataggggtcgggtaaaataaggttgagatttgttgggttgaatttttaggaggtgagatttttttagttatacgatgatgtaggaggtcggttggtataaggtataggttagaaagattgtgttgatgaaataggatattgtaaagaagttagttaaaatttattaaaattaagatggttatgaaagtgatcgttggtggtttttattgtttattatatgtaaattttaatgtattagtatgttaaaagatattattattagtgttatgatagtttataaatgttatagtaatatttagaagttaatttatatagtttaaaaaggggagggatttttagttttaggaaatttttgtttttttttttgaaaatttatgaataatttattttttgtttggtatataatgaagaaataattgtaagtttatttagttaagtcgtttatgttgttgttgtgtttatagagtagttattttttatttttttattttntttaataaatttgattttattttatggatttattttgaatttttttttgtaagaggtttaagaatttttttttggggtttggattaagatgttttttttgtaatatcgataaaaaaattaagaaggatatgtgagtgttgaaaatagtagttgttttggtggtatttatttattttaagaggttttattggatttaagcgatttagagtttttattttaataggatttgtaagtgttaagggattttatataaagtgtagtttagggtaaagtgaaaatgtgggttaataaaaaatgaaatttagttttaatttcgattttttatttttatttttttataagaaatatagatatatttgttttttttagttttgatttaggttggtaaatttataataaaaattttttgtanagaatttatgatttggttagattttaaatggatgtaggaatagaatttantattaattgtgtagtttgagtatttttaagttaaagatttatggtaaagtagtttaagttagattgtttaaaataaaaattgaaaaatttntttnattattgattgtaattaaaggaattttttgagaatgaatttaggaagtaaaataatagtttatggaagatttgatatgtgagaaagaatgataagtaaagaatatagtaataatataaataaatttaagtaaatattaataaaaataaaagaatggtgataaaaaagattaattaaaaaattagataatnggggntgtgtaagttgggagagtttaattagaattaaagtattttgaagtttttatttaattaggtttggntggtgtgtatttgtagttttagttatttaggaggttgaggtaggaaaattatttgagtttaagtttgagattagtttgagtaatatagtgagattttggttaaataaataaaatgaagtttttatttatgttgttggaaagaaggataatgatattgattaattatatattttagattttattaggttaattatgtatgtaaaaagtattaatataattataaaaaagataaaaatagagtgtataaggttaagttttgtagaaagaaaaaataaaattaaatataagttaatttaaaggaggatagaaaaataaaaagtattagagaagaatatatnaggaagtataatataaaatgttagaaataaatntaaaatatattaattgtaataaatataattggattaaattttttagttagaagnatatagattggtataaaataaataaataaataaaatttagttgttttttgtttaaaagagatatantttaaaatataaggttatagtatagttgaaagtaaaatagtttaaaaaatatattaaataaatataagtgaaggattgttggtatagtaaagttgtaataaaattaaaattttattaaaaaaagagattaattaatttagtaggttgataatattgataaaattttaagtttgattatatttagtattataaattttaagtaaatattataaaaaataatataagaattaaaagggtaaaattatttatgttaatgggtgattttaatatattttttttaatatttgatatgttaagtgtataaattagtaaggantatagaagatttggataataatattaaaagataatttaatagaaatatatagaatattttatttaagaattggagattgtatatttttttaagtatttatggaatatttataaatattgattatatgttaaattattaaataagttatagtgaattttaaagattttttataatatatttttggattttaatatgattaaataaatataaaattatatatatatttagaaattgttaaataatgtatataaatattttaaaataatatataaattggttaggtgtggtaatttatgtttgtaattttag

SEQ ID NO: 117 - DNA, 6012 bp, Artificial Sequence
  chemically treated genomic DNA (Homo sapiens)
atatatagttatatatttatatataataatttatatatatatagttatatatatatatatatagattatttagtttgtgtgtgtgtgtgtgtatatatatatatatatatataatttgggttgataagaattttataattgtttttagtttaagttgtatcggttatgtatgatggtttatatttagaattttagtattttgggaggttatagcggatggtttatttgaggttaggagttcgagattagtttgattaataaggtaaaattttatttttattaaaaatataaaaattagttaggtattgtggtatataattgtaattttaattttttaggaggttaaggtagaagaattattttaatttgggaggtggaggttgtagtgagttgagatggtattattgtattttagtttgggtgatagagcgagattttatttaaaaaatttttaaaaaattaaaaaaaaaagttatattaatttattaattttttttttttatatttttttttttaattttaggttttttttattaaaaaataaaataataatataagaatagaaaatttatagtttgaggtgttgtttaaggttggtttgaattatgattatttataataaatggtaaatttgtttatgtttattttattaataggtgtttttttttttgggttgtttgggaagtaaagttggtttattttttaaagtttgtttgtttttggtttgattggatgattttgaattttgaagtaagtttttatgttgtggaagtggtttattgagtaagttttatggtgtggaagaggtttgtgaatacgtaattttatattaatgtacgtaaatttgtatgtatatataattatttatatatatgcgtatataattatttatatatatatgtatataaagatttttttttttttttttttttttttttgagatagagttttgttttattatttaggttggagtgtagtggcgtgattttagtttattgtaatttttattttttgggtttaagtaatttttttgttttagtttttcgagtagttgggattataggcgtatattattacgttcggtttttttttttttttaagtatagatggggtttatattatgttggttaggttggtttcgaatttttgattttgtgatttgcgtattttagttttttaaagtgttgggattataggtatgagttattatattcggtaaagatttttttagttagttttttatttaggtgatttttagggtttttttaagttgtttgttttgtttgtagttataaaagatattgatatgtataggtagtatgtgtagagagtgtaattttaggttttgattgaatttagaatagaattagagataaggattttattgtaagttgtttatttggagggtaattttaggaaatattaggaagagggtaagagaaggaagttaatataagggtatttttttaagtaaattattattgtggtaattggggtattttgtttgggaatgttaggagttgggtagaatatattttagagttattttatttgcggattatttgaggttatgagttcgagaataatatggtaaaattttattttttttaaaattataaaaattagttgggtgtggtggtaggtgtttataattttagttatttaggaggttgaggtaggagaattatttgaatttaggaggtagaggttgtagtgagtcgagattacgttattgtattttattttggttagtagagtgagattttgtttttaaataaataaatatatatatatatatatatatatagttattttatttgaggggtgagggagttggggtatttattcgttaatttttgttagttattggttgaaggatgtttttagggtaaattaattttttggtattattgatttgtttttagatttgttgagtaagttttggtagatagagttaagtataggtgttggtagtaggtttacgattagagggaggtaagtgaggtgattagggtgtaaaatttaaggaggtatttatttttggggttgtgtaattgtagagtggatagtttgaatttttttggtatagaaaggcgattattgaaaggttatgggggaggtattgatagtgtttgttataggttttgtaggtaggtaggttgtttgggtttgatttttaatttagttatttaagggatatttatttaagttttttataattttgtttttatatttgtaaattgagataattatagtgtttattttataggattgttagagaggattatacggatgatttatattaaatgttgagaatatagttgggtataaaataagttttttataagtattagttttgatgatattgtaatgaacgttatagtgtatttattttggtaggtttttttgggggtttttttgtttgttttgagagggagttttattttgttttttaggttggagtgtagtggtgttattttggtttattgtatttttcgttttttaggtttaagtgatttttttgttttagtttttttcgtagttaagattataggtacgtgttattatgttaggttattttttgtatttttagtagagatggggtttcgttatgttggttaggttggtttcgaatttttgattttaggtgatttattcgttttgttttttagagtgttgggattataggtatgagttatttcgtttagttttggtggttttttgaggattaaggaagtaagattatttaatagttaagaaaagagttttttggtttaggtagatgtgggtttaagtttttagtttataatttgttatgtgattttaggtaaattatttaatttttttggattttaagtttttaataaaaatgattattaatttgggtatggtagtatgtgtttgtaattttagttatttaggagattgagataggaggattatttgaatttaggagtttgagattagtttgggtaatatagtaagattttattttttattttttggcgggggggtgggggatatagttttattttgttgtttaggttggagtgtagtggtgtgattatagtttgttgtagtttcgatttgttaggtttaagtaatttttttattttagatttttaagtagttgggattataggtacgtgttattatgtttagttaattttttttttaagagatagggttttgttatgttgtttaggttgggagattttattttataaaaataaaaattattatttaataataagatatttagttataatttttaaagttttaaataaaattaaaagatgtatgtaaggtgtttttttaagcgttgtgttaggtttgaagttaagtgtgtaataaattttaggtgtgattgttgggtgtttaatttcgtatgtaagtaggaagtttttgttatgttggagtggttaggaagttataatttaggtagtaatatttattgtatatttgtaagatgtaaagtattaagatgggaagtgagggttattaaaaagaaatattaatattttgttttggttttggtggtagattggaatttttttattttttttttaatagaattatacgtttatattttttgttttgtgattttgtggtttttttttagaatgggttatgaaaattttttagtaattttgagaacgtataaaaggagatagagtttgggcgtagtggtttacgtttgtaattttagtattgtggaaggtaaagagggaggattgtttgtggttaggagtttaaaattagtttgggtaatatagtgagattttatttttataaaagtaaaaataaaaattagttaaatatggtgatgtatgtttgtagttttagttgtttaggaggttgagataggaggattgtttgagtttaggaggttaaggttgtagtaagttgtaattatattattgtattttagtttgggtgatagagtaagattttgtttttaaaaaataaaaaaataaaaaaggttaggtatggtgatttatgtttgtaatttttgtattttgggaggttgaggtaggtggattatttgaagttaggagtttaagattagtttggttaatatggtgaaaatttatttttattaaaaatataaaatttagttaggtatggtggtatatgtttatagttttagttattagggaggttgaggtgggaggattatttgattttgggaggtggaggttgtagtgagttaaaattatgttattgtattttagtttgggtaatagagatagattttgttataaaaaaaaaaaaaaaaagtaaaaggaggttaagggaaaagttagaaaaatttggtttttgatgattttatggattttttatagaagatttgagttgttttttatttttttatgaatttattttaatatgagagaaaaataaattagtaagtgtttgagtttttgttatatatagtaaaaatgaaatttatggtatacgttttttttattttatttatttatttatttattttgagatagagttttattttgtcgtttaggttggagtgtagtggtatgattttggtttttgtaatttttgttttttgggtttaagtgattttttcgttttagtttttcgagtagttgggattataggtatgtattattaagtttggttaatttttgtatttttagtggagatagggttttattatgttggttaggttggtttcgaatttttgattttaggtgatttatttgttcggttttttaaagtgttgggattataggtatgagttattacgtttggttttattttattattttttatgttttgggtacggtattgtggaagatcgtgttttttggggatcgtagaggaatatttttaagttttgtaaagaggagatagtttttaggttgttttttgtagggtgtggtttttttgtttatgtttttgggatttggttgttttttattttatttttattttttgttaaaggttttaatttttgttttgtgttagttcggtgatttttgttttttgtaaagagataaattagaaatatttatttatgttagattagttttgaggttggtttagatacgagggtatgagttgttttaatattaagttttatttttttttgagtttagtgggtatttattttatttacggtagatttgtttatttttttattaggtttatttattacgtagttggatttttttattttgatgaatgtattttttggtaagggatattaggttataattgttaaaaattttttagtaataatttttttttagttttttttttttttttttgagatagaattttgttttgtcgtttaggttggagtgtagtggtattattatagtttattgtagtttggaatttttggttatagcgatttttttattttggttttttaaagtgtttagattataggtatgagttattgtgtttggtttagaaataatgttttgatgtaattaaggatagttaagttagaatttagagaaatgagatttattattttttttaaatttagttgttaaattttaattatttatattgtttttttatttacgtatttttatttatttatatttttttaagtaataatattttagtttttttttgaatagttttttatttacgttattggtttatttggtttgagtgatggaaattttattttttgtatttagtgtagttatgtgatttgtatatggttaattagagtttcgtaggtttttggttttagtgattagtgtttttatttggattattgagagttaggtttaggattttgttttattttttgtaaagataaaggtaatttttttttttgttggttttgggtttgtgagggtgggatggtgggggttgttggtaattatttttttatttagagggtaatagttgattgagagagtggtattagtataaaaggaagttaaattaagtgatggaaagaaagagatatatagagattagttcggatagtattatttgagtttttggattaagttatatttgaat

SEQ ID NO: 118 - DNA, 6012 bp, Artificial Sequence
  chemically treated genomic DNA (Homo sapiens)
atttaagtgtggtttgatttaggagtttaaatgatgttattcgggttggtttttgtgtgtttttttttttttattatttagtttagtttttttttgtgttaatgttatttttttaattagttgttattttttgggtggaaaggtggttgttagtagtttttattattttatttttataggtttaagattagtagagaagggagttatttttatttttgtaggagatgaaataaaattttgggtttgatttttagtggtttaaatggagatattaattattaaggttagaggtttgcgaggttttgattggttatgtgtaaattatatgattatattgggtgtagaaagtagaatttttattatttagattaaatgaattagtagcgtgggtaagaagttgtttagaggaaaattgaggtattgttatttgaagaagtgtgaataggtgggggtgcgtgggtaaagaaataatgtaagtggttggaatttggtagttgaatttaaggggggtggtggattttatttttttgagttttaatttggttatttttggttgtattagaatattatttttggattaggtatagtggtttatgtttgtaatttgagtattttgggaggttaaggtgggaggatcgttgtggttaggagttttaggttgtagtgaattatgatggtgttattgtattttagtttagacgatagagtaagattttgttttaaaagaaaaaaaaaaagattagaaaaaaattattattaaaaaatttttggtagttgtggtttggtgttttttgttaagagatgtatttattaggatgaaaaggtttagttgcgtaatgaatgaatttagtggagagatgggtaggtttatcgtgagtggaatgggtgtttattgagtttaagggaaagtgggatttggtgttggggtagtttatattttcgtgtttggattaattttagggttgatttgatatggatgggtgtttttgatttgtttttttgtagaaagtagaagttatcgggttggtatagagtaggggttgaggtttttgataggagatggagataaggtgagggatagttagattttaggggtatgggtagaggagttatattttgtaggaggtagtttggaaattgttttttttttgtaagatttgagaatgtttttttgcgatttttagaaaatacgattttttatagtgtcgtgtttagagtataaaaaataataaaataaggttaggcgtggtggtttatgtttgtaattttagtattttgggaggtcgaataggtggattatttgaggttaagagttcgagattagtttggttaatatgatgagattttgtttttattaaaaatataaaaattagttaggtttggtggtgtatgtttgtagttttagttattcgggaggttgaggcgggagaattatttgaatttaggaggtagaggttgtaggagttaagattatgttattgtattttagtttgggcgatagagtgagattttgttttaaaatgaataaataaataaataaaataggaagggcgtgtattatagattttatttttgttgtgtataatagaaatttaagtatttattgatttgttttttttttatattaaaataagtttatggaggggtgggggataatttaggttttttgtaggaaatttatagagttattagggattaagtttttttaattttttttttggtttttttttgttttttttttttttttttgtaatagggtttgtttttgttgtttaggttgaagtgtagtagtatgattttggtttattgtaatttttattttttagggttaagtgatttttttattttagtttttttagtagttgggattataggtatgtattattatgtttagttaagttttgtatttttagtagagatgggtttttattatgttggttaggttggttttgaatttttggttttaaatgatttatttgttttagttttttaaagtgtaaggattataggtatgggttattatgtttggttttttttgtttttttgttttttaaagatagggttttgttttgttatttaggttggagtgtagtggtgtgattatagtttattgtagttttgattttttgggtttaagtaatttttttgttttagttttttaagtagttgggattataggtatgtattattatgtttggttaatttttatttttatttttgtagagatggggttttattgtgttgtttaggttggttttgaatttttggttataagtaattttttttttttgttttttatagtgttgggattataggcgtgagttattgcgtttagattttgtttttttttgtgcgtttttaaggttgttggagagtttttatagtttattttagagaggaattataaagttataaagtagagggtgtggacgtgtgattttattaaaggagaaatggaagaattttagtttattattaggattaagatagagtgttaatgtttttttttaatggtttttattttttattttagtgttttgtattttgtaggtgtgtaataaatattgttgtttgaattatagttttttggttattttaatatggtaggagttttttgtttgtatgcgaaattgaatatttaataattatatttaagatttattgtatatttgattttaagtttggtatagcgtttagagaaatattttgtatatattttttaattttatttaaagttttaaaaattgtggttaagtattttattattaaataataatttttatttttatgagatgggattttttagtttgggtaatatagtaagattttattttttaaaaaaaaaattagttgggtatggtggtacgtgtttgtagttttagttatttaggagtttgaggtggaaggattgtttaagtttagtagatcgaggttgtagtaagttgtgattatattattgtattttagtttgggtaatagagtgagattgtattttttattttttcgttaaaaagtaagagatggggttttgttatgttgtttaggttggttttaaatttttgggtttaagtgatttttttgttttagttttttgagtggttgggattataggtatatgttattatgtttagattaataattatttttattagagatttgaggtttagagaagttaagtgatttgtttaaggttatataataaattgtggattggggatttgaatttatatttgtttgagttaaaaggttttttttttaattattaggtgattttgtttttttgatttttaaaaaattattagggttgagcgaggtggtttatgtttgtaattttagtattttgggaggtaaggcgggtggattatttgaggttaggagttcgagattagtttggttaatatggcgaaattttatttttattaaaaatataaaaagtagtttagtatggtggtacgtgtttgtagttttagttacgagggaggttgaggtaggagaattatttgaatttgggaggcggaggatgtagtgagttaagatggtattattgtattttagtttggggaatagagtgagatttttttttaaaataaataaaaaaatttttaaaaaagtttattaagataaatgtattataacgtttattgtaatgttattaaagttaatgtttatgggaggtttattttgtgtttagttgtgtttttagtatttgatatgaattattcgtgtaattttttttaatagttttatgaagtaagtattataattattttagtttatagatgtggaagtagagttataaggaatttaagtgagtgttttttgagtggttgaattaagaattaaatttaggtagtttgtttgtttgtaaaatttgtagtagatattgttagtgttttttttatagttttttagtaatcgtttttttgtgttagaaaggtttaaattgtttattttgtaattgtataattttaagagtaagtgtttttttaaattttgtattttagttattttatttgtttttttttagtcgtggatttgttgttagtatttgtatttggttttgtttattagggtttgtttaataagtttgggggtaaattagtagtgttaagaagttagtttgttttgggaatattttttaattagtgattgataggggttggcggataaatattttagtttttttattttttagatgggataattgtatgtatgtatgtatgtatgtatttatttatttagagatagagttttattttgttgattagggtggagtgtagtggcgtgatttcggtttattgtaatttttgttttttgggtttaagtgatttttttgttttagttttttaagtaattgggattatagatatttgttattatatttagttaatttttgtagttttaggagagatggggttttattatgttgttttcgaatttatgattttaagtgattcgtagatgggataattttgaagtgtgttttatttagtttttggtatttttaaatagaatgttttagttgttatagtggtaatttgtttgagaaaatatttttatattaattttttttttttattttttttttgatgttttttggaattattttttaaataaataatttgtagtagaatttttgtttttgattttgttttgagtttagttagagtttaaagttatattttttatatatattgtttatatatgttaatgttttttgtaattgtaaatagaataagtagtttagaaaaattttggaagttatttaagtaggaaattggttaagaaaatttttgtcgggtgtggtggtttatgtttgtaattttagtattttgggaggttgaggtgcgtagattataaggttaggagttcgagattagtttgattaatatggtataaattttatttgtatttaaaaaaaaaaaaaagtcgggcgtggtggtatacgtttgtaattttagttattcgggaggttgaggtaggagaattgtttgaatttaggaggtaaaggttgtagtgagttgaaattacgttattgtattttagtttgggtgataaagtaagattttgttttaaaaaagaaaaaagaaaaaaaagaaaatttttgtgtgtatgtatatataagtggttgtatacgtatgtatataaatggttgtatatgtatgtaggtttgcgtgtattggtgtgaaattgcgtgtttatagattttttttatattataaaatttgtttaatgggttatttttataatataaaaatttgttttaaagtttaaggttatttagttaagttaagagtaggtaaattttgaagagtggattaattttgttttttaaatagtttaagaggaaggatatttattgataagataaatatgaataaatttgttatttgttgtgaatgattatggtttaagttagttttaagtagtattttaagttgtgggttttttgtttttgtgttgttattttattttttggtgggagaggtttgaggttgggaagaggaatgtggaggaaagaagttggtgagttggtgtagtttttttttttaattttttaaaaattttttagatggagtttcgttttgttatttaggttggaatgtagtggtattattttagtttattataatttttattttttaggttaaaatgatttttttgttttggttttttaaggagttgggattatagttgtgtgttataatgtttggttaatttttgtatttttagtagagatggggttttgttttgttggttaggttggtttcgaatttttgattttaagtgaattattcgttgtggttttttaaagtattgggattttaggtgtgagttattatgtatggtcggtgtagtttaaattggaggtagttgtggggtttttgttaatttaaattatgtatatatatgtatatatatatatatatatatataggttaaataatttatatatatatatatatagttatatatatatagattattatgtatagatatatagttatatat

SEQ ID NO: 119 - DNA, 5143 bp, Artificial Sequence
  chemically treated genomic DNA (Homo sapiens)
tgttttttggtttttgtcgagtgtgtgtgtgtgttgggggggtatagttttgttgttgagtttttttggggtttacgtgtttaggatttagtataggaatcgttagttatttgttagttagaagtttttttttttttagttatttaaaattttttttgtaattatttattttttttttgaggttagatttgtttagttagagaatttatttaggttgagggtttatatgtggttgggggttttttttaatcgtttagggtgtttggtttgtttttaaggttgtatgttgttttggtggttttacgtgtggttaggagtttaggtttagtaggagattagggttggttgtggttaggaagaggtagatgcggcgggagaggttaggttttattttgcggggacgttcgtttttattgggcggtataggaaggtcggttaggaggtttatgcgttttcgtttcgtgttgtaggtttttagcgtttaggagtaggtaaaggtatgagagggcgtttggggacggggtttttgtatttggagggtttggaggaggtaggggtttatttgttgtagaaggcggggggaggggaaggttgtgataattgtattagttacggttgggttgattcgattgaattgtttgatttgttttcgttaggtcgtttgtagttttgcgtcgttttttgttattggttcgtcggttgtttagcgttttgttgtgtagaaggagaaggtttgggattttcggtattgtttggggatagagagaagttttttagaatcgtatgtgagtagtttttaaaaggtcggggaggtattattattttgaggtgattttgtttttttttagttttggtattacgtatttgaggggatattgggcgagagttttggtaacggcgtatacgtgtcgatttagtttttgttaagaggttattagtagtacgtttaggtttgtttagagttgtaggagtattagggtttggggaggaggtaagttgatgggtacgagttagaggaaggttattcgggatatatagttgatagttgttttatgtattacgttgggaattaaatttagttagtagtttaattattgggatttaggttatttgatttatttagtttagataggtttttattttttttattttcggttagttgacggttatttcggtatcggttattttcgggttttttggttgttgtgtttttcgggaaacgtgttggcgagatttgagtagaggtgattattttttttcgttttttatggggtttgttttgttcgagtttggtttttgttagagtttatttggagaagtgggattagttgtgttatagtaattttagaagtgtgtttattttttttgaattttcgttttagttagttttgttgtgggtatgagagtgagcggtattataggtaggtatttagttcgatgatagttaggtggggtcgggcggtggtttcgggggagatttagggtatttagtgggttgggttagagatttgaagatgagaacgtgtggtatagttgtttataggaggttgcggtttatggttatgggttattaggttatagttggtttgtagaatagtaagtttgaaaaagagttagtggtgtcgagaggagtttttgtttcgttattttttttgagaaaattagttttgtgttttttacgaggttaaagaggttaaggagattttggagtggttgttcgggtatatgttagttttattgagttttttattttggtttatttttgtattttagtttagttttgatttagtataaagtagtagtttgagagatattgattttgggatatagggatttggtagggggtttagtttaattttacgttatttggtattatagtatttgagtattgtttttcgtaggtaggggttaggttgtttgttgttagaggacgaagtttgtagtttattgttcggatttcggttttttgatattttttaggattttttaggagtagttgtagttttcgtaggtgtttaggagttttttttattttattttagaaatttttacggttttggattagagaggagttttggtttgttttatgttttttttagtttcgtttataggggtagggatcggcggagtaggcgtttttcggttgggaatttattttttttgattagagagggattattgttattattcgagtatttgggttagtgtggcgacgttttgtagaaatttttcgggttttagtagtagtagtaatttttgtttatttgtagtttatattttaggaggtagttgtggggatatggggacgcgttgttgtttgttttaatttcgggtgttttaggggttttgtttgggtagtttagtagtaaagcggttcgtggttttagttaagtttaggttttgataggtttgttttatagaagtttagtgtttttttttttgttaaggttaagtttaggttaggtttttgtggtcggtaggaatttagattatagtttgaatcgagacggaattttttttagttagttcggttttatattagtagaacggtttgggtatttttatttttcgttttttatttttgttttatttattcgcgagacgcgtacggtttagggtagttgttttagggatagttttagggttgaaattatggaagtaaaatagttaattcgcggttggttttcgggaattcgcgattatttacgttgcgggggtaggggtcgggattcgttcgggtttatcgtaggttgcgggtcgggcgttggggttcgatgcggtattcgtagtttagggtttttagggtttttattaggacgtcggtatcggcgttttttaggatggttgggatcgggggagaggagcgcggttattgtttttttttattttcgcgagcgttttatttgggcgggtggtcggatcggggagtttttattcggtataaattttcgattgggaggcgggttcggttttaggtttttcggtacgcgcgtttcgtttagtcggatagagggcgtcgtttggcggagaaaggttttttttatttcgagtatcgttcgtgtttttcgtcgtatttgtgtttacgtatatcgcgaggcgttttagtatttgtttcggtcgtagtagtcgtaacgtttcggtagtcgttttgcgtttattcgttgggtttcgggttttcgcggcggttttcgagtcggcggagtttttagcgtcggagtttgagattttttaggttggaggtcgtcgttgatcgttttcgtttcgttttcggtttcggttttggtaagagattttcgttttttcgggtttaattcgcgttatggtcggatcgatttttttttcgttttcggtcgcgatcgaatattttagtttgggatatcggtttttttcggtgattttcggtcggatcgttgaggacgcggattcgttatggcgcggaagaaggtgcgttcgcggttgatcgcggagttggttcgtcgcgtgcgcgttttgcgggagtaattgaataggtcgcgcgatttttagttttacgcggtggattacgagattttgacgcggtcgttttttggacgtcggttgtcggttcgggtttgggtcgacgtgcgtcgcgagagtcgttttttgtagttgttcggtcgtttttcgtttttcggtttgggtcgtttggttacgcgtaagttttggttgtggtagtacgacgagtcgtgttattggcgttttacgcgggtgcggttcgattatacggcgtaggtaggtgcgtgtatttcgttcgtatttcgtttttgtagtcgtttggttttttcgtttttttttttttttgtaggtttgcgtggttgaggtttttattttttgatttcgggggtcgagagttttgcgagttgatttcgtttttttttggttttgtagaatttggattacgggaaggtttggggtattttgatttttaaaggtaaggttcgggagagcgggtgttcggtagttcgatgtcgatcgtcgacggtatagtaagtgtgtgtagacgtttttttttttttattagggaagattgagagcgaggcgcgggagatcgaatacgttatgtattatgattggcggttggtgtttaagtacgaggaggaggtttttatcgcgtttacgtcggcgtcggaagatagtttggttttcgtgtcgtattcgtttttttttcgggttatgattatcgtagaacgatagaaaaatggagatataagtatcgaggagtttatgttgaatgtgtagaggatacgtatggaattttgggattattttgtaaaataggaagataaaggaagggttaagggtattttcgtttagaatgttagaattagcgggtggttttaggggttgtgaggtagtggggattttattgatgaaagaaatcgtttttgcgttatattcgagtttgtttttcggagtagggagtttatttttcgcgacgtgttttgagggtttgtattttaggggggagggttggggtaaatcgttatttgtgttttttttttggttttgttgtttttatatttaatttcgagggtttacgttggggaaagcgggaagcgttcgtttttttttttttattagtgttttttttgtttggatttcggtagaagttatgaaagggaataaagagaaaagaagtatttagggtcgtggtgtttttgcgttttgtttttaggatcggggagagaagggttgacgttgtggtcgtggttttggtcgggggggcgcggggggggcggggttcgggcggtgcggagtagggcgtcgcgtgggtggaattatttgggcgggttgtgggggatatagttagtgttcgagttgttggaggagatttggttttcgtagttgtttttcggttttttacggttgtcgggtttcggggtgtaagtgaagtagttttttcgcggaggtcgtagcgtttcgattaggtttttttaagcgtaggtttcgtttcgggcgttatcgtttcgtttcgcggatttcgttttcgtatcgttattatgatttgtttggtgttgattattttcgttaatttttttttcgcgggtgagtcgcgcggcgcgggtcgggggcgggtggtcggtgttgggtcggtttgacggttcgttttcgtttgtttcgtagt

SEQ ID NO: 120 - DNA, 5143 bp, Artificial Sequence
  chemically treated genomic DNA (Homo sapiens)
gttgcggggtaggcggggacgggtcgttaggtcggtttagtatcggttattcgttttcggttcgcgtcgcgcggtttattcgcggggaagaggttagcgaagatggttagtattaggtagattatgatggcggtgcgggagcgggattcgcggggcggggcggtggcgttcggggcggggtttgcgtttaaagaggtttggtcggggcgttgcggttttcgcggggaggttgttttatttgtatttcggaattcggtagtcgtggggggtcggagggtagttgcggaggttaagttttttttagtagttcggatattaattgtattttttataattcgtttaggtggttttatttacgcggcgttttgtttcgtatcgttcgaatttcgtttttttcgcgttttttcggttagggttacgattatagcgttagttttttttttttcggttttaaagatagagcgtaaagatattacgattttgggtattttttttttttttatttttttttatagtttttgtcgggatttaggtagagagagtattaatgggggaaagggagcgagcgtttttcgttttttttagcgtgggttttcggagttgggtgtgggggtagtagggttagaggaaaggtataggtggcgatttgttttagtttttttttttaagatgtagatttttagaatacgtcgcggaaggtgagttttttgtttcgagaggtagattcgggtgtaacgtaaagacggttttttttattaataaggtttttattgttttatagtttttaaggttattcgttggttttggtattttagacgggggtgtttttggttttttttttgtttttttgttttgtagggtaattttagggttttatgcgtattttttgtatatttagtatgggtttttcggtgtttgtgtttttatttttttgtcgttttgcgataattatggttcggaggagaggcgggtacggtacggaggttaggttgtttttcggcgtcggcgtgaacgcggtgaaggtttttttttcgtgtttgggtattagtcgttagttatggtatatgacgtgttcgatttttcgcgtttcgtttttagttttttttgatgaagaaaaagaggcgtttgtatatatttgttgtgtcgtcggcggtcggtatcgaattgtcgggtattcgttttttcgagttttatttttgaaggttaggatgttttaggttttttcgtggtttaagttttgtaaagttagaaggaagcggggttagttcgtaaagttttcggttttcgaggttaggaggtgggagttttagttacgtaaatttgtagggaggaggggaggcggggagattaggcggttgtaggggcggggtgcggacggggtgtacgtatttatttgcgtcgtgtagtcgggtcgtattcgcgtgaggcgttagtagtacggttcgtcgtgttgttatagttaggatttgcgcgtgattaggcggtttaggtcgaagagcgggaggcggtcgagtagttgtaagaggcggttttcgcggcgtacgtcggtttaggttcggatcggtagtcggcgtttagagaacggtcgcgttaaggtttcgtagtttatcgcgtagagttgggagtcgcgcggtttgtttagttgttttcgtagggcgcgtacgcggcgggttagtttcgcgattagtcgcggacgtattttttttcgcgttatggcgggttcgcgtttttagcggttcggtcggaagttatcggaagaggtcggtgttttaggttaaagtgttcggtcgcggtcggaagcgaggaagaggtcggttcggttatggcgcgggttggattcgggagggcgggggttttttgttagggtcggggtcggggacggggcgggagcggttagcggcgatttttaatttgggagattttagatttcgacgttgaggatttcgtcggttcggaggtcgtcgcgagagttcgggatttagcgggtgagcgtagggcggttgtcgaggcgttgcggttgttgcggtcggagtaggtgttgaagcgtttcgcggtgtgcgtggatataggtgcggcggagggtacgggcgatattcggggtaggaaaggttttttttcgttaggcggcgttttttgttcgattgggcggggcgcgcgtgtcgaggggtttggggtcgggttcgttttttagtcgggggtttgtgtcgaatggagatttttcggttcggttattcgtttaggtagggcgttcgcgagggtggaaggaagtagtgatcgcgtttttttttttcggttttagttattttggaagacgtcggtgtcgacgttttgatggaggttttggaggttttgggttgcgagtgtcgtatcgagttttagcgttcggttcgtagtttgcggtggattcgagcgagtttcgatttttgttttcgtagcgtgagtggtcgcgggttttcgagggttagtcgcgagttggttgttttgtttttatgattttagttttggagttgtttttgaggtagttgttttgggtcgtgcgcgtttcgcggatgggtaaagtaaggatggagaacgggaagtggaggtgtttaagtcgttttgttggtatagagtcgagttggttggagaaggtttcgtttcgatttaggttgtggtttggatttttgtcggttatagagatttggtttgagtttggttttggtaggaaagggaatattgggtttttgtagagtaggtttgttagggtttgggtttggttggggttacgaatcgttttgttgttggattgtttaggtagggtttttggggtattcggggttgagataggtagtagcgcgtttttatgtttttatagttgttttttgaagtgtgggttgtaggtgaataggaattgttgttgttgttggagttcgaggagtttttgtagggcgtcgttatattgatttaggtgttcgggtggtggtagtagtttttttttaattaggaggggtgggtttttagtcgggaggcgtttgtttcgtcggtttttgtttttgtagacggggttggagggggtatggggtaggttaggatttttttttgatttaaagtcgtagaggtttttagggtgagatggagaaagtttttgggtatttgcggaggttatagttgtttttagaggattttgagaagtgttaggaggtcggggttcgggtagtaggttgtaggtttcgttttttgatagtagatagtttggtttttgtttgcggggagtagtgtttaggtgttgtggtgttaggtagcgtggggttaggttagattttttgttaggtttttgtgttttaggattagtgttttttaagttgttgttttgtgttaggttaaagttaggttggagtatagaggtggattaggatgaggggtttaatggaattgatatgtgttcgagtagttattttagggtttttttagtttttttggtttcgtgggaggtatagagttggtttttttagaaggggtaacggaatagaggtttttttcggtattattggtttttttttaggtttgttgttttgtaaattagttgtggtttggtggtttatggttataggtcgtagttttttgtgaataattgtgttatacgtttttatttttagatttttggtttaatttattgggtgttttggatttttttcgagattatcgttcggttttatttggttgttatcgggttggatgtttatttgtggtatcgtttatttttatgtttatagtagggttggttgggacgggggtttaggggaggtgggtatatttttggggttgttgtggtatagttgattttatttttttaggtgggttttggtagaggttaagttcgggtagggtaggttttatggggagcggggaggaatggttatttttgtttaggtttcgttagtacgtttttcgggggatatagtagttagagagttcgaaggtggtcggtgtcgaggtggtcgttagttggtcggaggtggaagaggtgagggtttgtttgagttgggtgagttaggtggtttgggttttagtgattgggttgttggttgggtttggtttttagcgtggtatatggggtagttattagttgtgtgtttcgggtagtttttttttggttcgtgtttattagtttgttttttttttaggttttggtatttttgtagttttgggtaaatttggacgtgttattggtggttttttggtaggagttgagtcggtacgtgtgcgtcgttattaaggttttcgtttagtatttttttaagtgcgtgatgttaaggttgaaggggggtaggattattttaaggtagtggtgttttttcggttttttgggagttgtttatatgcggttttaaaaggtttttttttgtttttaggtagtatcgggaattttaggttttttttttttgtatagtagggcgttgggtagtcggcgagttagtggtaagagacggcgtagggttgtaggcggtttggcggaggtagattaggtagtttagtcgggttagtttagtcgtggttgatgtagttgttatagttttttttttttttcgttttttgtagtaggtgggtttttgttttttttaagttttttaggtgtagaagtttcgtttttaggcgtttttttatgtttttgtttgtttttaggcgttggaggtttgtagtacggagcgggagcgtatgggttttttggtcgatttttttgtgtcgtttagtgaaggcgggcgttttcgtagggtggggtttgatttttttcgtcgtatttgtttttttttgattatagttaattttgattttttgttggatttgggtttttgattatacgtgggattattaggatagtatgtagttttggggatagattagatattttgggcggttggggaggatttttagttatatgtggatttttagtttgggtgggttttttggttgagtaggtttgattttagggggagggtgggtggttgtaggggaagttttaggtagttgggagaagaggggtttttggttggtagatggttggcggtttttgtgttgagttttgaatacgtaggttttaggggagtttagtagtagggttgtgtttttttaatatatatatatattcggtagggattagaaggta

SEQ ID NO: 121 - DNA, 6423 bp, Artificial Sequence
  chemically treated genomic DNA (Homo sapiens)
atggttttttcggtttttttatttaggtgggagtttttgaattaggttgtgtttgtgggagttttagttttgatttggttttaagatttgatgtagtgagtaagtgaaagtatttaagagagtttttagggggcggtggtgtttaaggttacgttttttttttttttttttttttttttttttttttttttgagatggagtttagttttgttattagattggagcgtagtggcgcgatttcggtttattgtaatttttattttttgggtttaagttatttttttgttttagtttttcgagtagttgggattataggtatatatcgttatatttagttaatttttgtatttttagtagagatagggttttattacgttggttaggatggtttttattttttgatttggtgatttatttatttcggttttttaaagtattgggattataggcgtgagttatcgcgttcggttaaaggttacgtttttatttaagttttttttttgattttgtttaatatttgtaatgttaaaatagttaatacgttttgttttgtgtataatatagtttattaattgtgttatttaaagtttttatatttttattgatataaaaaaattgtttttttggtcgggtacggtggtttacgtttgtaattttagtattttggaaggtcgaggtaggtggattatttgaagttaggagttagagattaatttggttagtatggtgaaattttgtttttattaaaattataaaaattagttaggtgtggtggtgtacgtttgtaattttagttatttaggaggttgaggtacgagaattatttgaatttgggaggtagatgttgtggtgagttgagatcgtgttattgtattttaatattttgggtaatagagcgagattttgttttaaaagaaaaaaaaaattgtttttttttttttttttttttttttagataggattttattttgttatgtaggttggagtgtagtggtgttattatggtttattgtagttttgattttttgggtttaagtgagttttttattttatttttttaaataattgggattataggcgagtttcgttatgtttggttaattttttgtttgtattttttgtagaaatggggttttttggttgggcgcggtggtttatatttgtaattttagtattttgggaggttaaggcgggtggattacgaggttaggagatcgagattattttggttaatacggtgaaattttgtttttattaaaaatataaaaaatttttcgggcgtggtggcgggcgtttgtagttttatttattcgggaggcgaggtaggagaacggcgtgcgttcgggaggcggagtttgtagtgagtcgaaatcgcgttattgtattttagtttgggtggtagagcgagatttcgttttaaaaaaagaaaaaataataaataaaaaaaaagaaatggggtttttttgtgttgtttaggttggttttagtgattttttttttttggttttttaaagttttgggattataggtatgaattattgtgtttagataaaaattgatttgtaaattttttgagatagtattttattttgttttttaggttggagtgtagtggtgtgattatggtttattgtagcgttaattttttgggtttatttgatttgtaaatttcgagggaaggtgtaataaatttttttgtaatgtttttgttttttaaaatttttgtattttatagtttagtttcgtgggttgatgttttattttgtttttgtgtgtgtgtgtgtgtgttttgtgtttttttttgagatatagttttgtttttgttgtttaggttggagtgtaatggtgtgattttggtttattgtaatttttattttttgggtttaagagatttttttgttttagtttttcgagtagttaggattataggcgtcgttattatatttcgttaattttgtatttttagtagagatggggtttttttatattggttaggttggttttaaattttcgattttaggtgattcgtttattttagttttttaaaatgttgggattataggcgtgagttatcgtatttggttaatgttttatttttgagaatataatagtttataatatattttatatagattatatttgttatgtgtagataaatagattttttttttatttaatattttttgttttaggtttatttttttggtattaatattggtatatttattttgtttgtagttttttgttttttttttttttttttttttttttgagatagagttttattttgttatttaggttggagtgaagtggcgggatttcggtttattgtaatttttattttttgggtttatgcgatttttttgttttagtttttcgaatagttgagattataattgtgtgttattatgtttagttaatttttgtatttttagtagatacggggttttattatattggttaggatggtttaattttttgatttcgtgatttatttgttttcgttttttaaagtgttgggattataggtatgagttattgtgtttggtttttttttttttttttgagatggagttttattttgttatttaggttggagtgtagtggggtaattttaggttattgcgattttcgtttttcgggttttagtgatttttttgttttagtttttcgagtagttgggattataggtatttattattatgtttggttaatttttgtatttttagtagagacggggttttgttacgttggttaggttggtttcgaatttttggttttatgtgattcgtttgttttggttttttaaagtgttgggattataggtgtgagttattgtgtttggtttggtttttttgttttttttttttttttttagttttttttttttaggttaataattatttattgttaataaaaatttttaggtttgtattttattaagaaatattttttttacgtttttttttttgaattaaataagatttttggtatattttatttgttttgttttattatatggattttgtttttttgtttttttgttttttgagatggagttttatttttgttgtttaggttggagtgttatggtataattttagtttattgtaatttttattttttgggtttaagcgatttttttgttttagttttttgagtagttgggattataggcgcgtggtattatttttagttaatttttgtatttttagtagagacggggttttattatgttggttaggttggtttcgaatttttgattttgtgatttgtttattttggttttttaaagtgttgggattataggtatgagttattacgttcggtttttatggttttttaaatagtttagaattttatttttaggtaattaatttgtttttttaaatatatgttttttttatttaagaaattttttttaaataattgtattttattttataatcgtttttaaataattattgagatttggttaatttgttttgtttatttggtagtagttttttgtggttgttttttttttttattggagtttttgaattttaagtttgttatttgattgtaattaaaagttgggtttggaatataatcgtagttttattatttatttgttgtgtgatttggtaaatttttttttttttttttgagacggagttttgttttgttgtttaggttggagtgtagtggtataatttttgttttttaggtttaagcgattttattgttttaggttttttagtagttgggattataggtgtttgttattatgtttagttgatttttgtatttttagtagagatgaggttttattatgttggttaggttggtttcgaatttttgattttgtgatttgttcgtttcggttttttaaagtgttgggattataggtatgagttattatttttagttagtttttttttttttttttttatttttttttttttcgagataggattttatttttttgtttaggcgggagtgtagtggtataattacggtttagcgtagttattgtttattgggtttatacgttttttcggttttagtttttcgagtatttgggattataagcgtgagttagtttggttaattttggttaatttttgtagaaacggggtttcgttatgttggttaggttggtttttaatttttggatttaagggatttattttttttttttttttaaagttttgggattatcggagtgagttattgtgttttgttggtaaattttttaaattgtttgtgttttagtgattttatttaataaagggaataattgtagtatattttttttagagttgtgaagatttaatggaataaataaggtaataaatgaatggatggggaatgaaggatgtgggtttttttttttttgttttttaataagtttttattattaattttttattgtttgtttttttttttttttttttttttttttgttttttttttagttaggaaatttggggtagggaggtttggagttagcgggtgcgtcgggaggttgcgggtattgattcgggtcgcgtacggagatcgcgggagaaggatttataatcgcggaagaaggattagggtggagtttgtggttgttgtaggaggaggaattcgtcgtttggtttatattataggagaagggcggagtagatggtattttgtttatcgtttttcgtttacgtattttagtttgtagcggggcggagcgtgaaaaatagttcgtgtttttcggtcgattttgtagtgcgacggcggtgtttttagacgtttcgttttacgtcgtatgcgtttcgggaacgcgtggggcggagttttcggaggtttcgttttgttgtcgattttgtggagcggagggtgaagttttcggatgttagttttttatcgttggttcggtcgcgttgtggcgaagggggcggagtttgtattcgtttcgttttttttcgtttcgttcgtttcgcgtcgcgcggggaggaggaggaggagtcgcggcggggttcgtattgtagcgttagcgttcgagcgggcggtcgagttttcggagcggtttggtttcgagtttcgagcgggcgtcgtttagtagtaggtcgcggtcgtagttttatttagttcgcgttcgttatgtcgttcgcgggtttcgtttgagttgcggttttcgcgcgcgggcgggtttggggacggcggggttatgcgcgcgttgttttaacgatgtcgttcgtcgcgttcgttcgtttggcgttggttttgggtttgggtttgtggttcggggcgttggcggggggtttcgggcgcggttgcgggttttgcgagtttttttgtttttgcggtttagcgttcggcgtcgtttgtcgcgttaattgttcgggtcgcgggttgcggacgttcggtttcgcgttgcgtattttcgcggacgttatagcgttgtgagtagcgggtttagcggtattcgggagaggtcgcgggacgggcgggcgtgggcgggttttttggttcgggacgggaagtaggacgcgggttaggacgtttttaggggcgaggtttcggcgcggtacggcgggttttgttaaataaggaacgtttggagtcgcggttggtacggtttcggggagtcgaaaaatttcgggtttggagatagacgttttattcgggggttttgtagacgttagcgggggcggggcgcggaggtcgcgtttagttgggaggataaatagtcgttaattggagaggaattgggatgcggtttggggttgcggggtattcggagaggtggggatggttgtagggggcggtagggaagagttttaggaggtgtttggaaaaggatttgatggatgtgtaagaattgggttgatgtttaggaaggggcgatgaggtgggtttagaagaaggggggtgaacggtgtgagtaaagatcgtgaggttggaggttggttacgggaggtgtgaggggtaggggtagggtgggaggtgggttcgcgggtgggttggggttatgaagggttttaggcgttttgttattgggttttaaggttattttgagaataggggtgaggggggattgtcgtggggggttaaagttttgttatgttcgttttcgggagataaaaataataggtggtttttatggagacgttgtttagagttaggtttgtgttaggtttttgttgggggtcgttatgcggaattttgattttgattattcgaggtatagggatcgtggagatttgtattttatagatgaggaaataggtttggagaggtgatacgatttgttttaggtattatagtcgggatgtgtatagtaggggtttggaattatgaggtgtttaggatttagggttggattgaaaagggcggaggggattaagataagtagatagttgtttttagcgttggggagagttttgggattagtttgatgtt

SEQ ID NO: 122 - DNA, 6423 bp, Artificial Sequence
  chemically treated genomic DNA (Homo sapiens)
ggtattagattggttttaagattttttttagcgttggggataattgtttgtttattttagtttttttcgttttttttaatttaattttgggttttgggtattttatagttttaaatttttgttatgtatatttcggttgtgatgtttgggataggtcgtgttatttttttaaatttgtttttttatttgtgaaatgtaaatttttacggtttttatgtttcggatggttagagttaggatttcgtatgacgatttttaataggagtttggtatagatttggttttgggtagcgtttttataaaggttatttgttgtttttatttttcgaaagcgaatatgataaggttttaattttttacggtaatttttttttatttttgtttttaggatagttttggaatttaatagtagagcgtttgaggttttttatgattttagtttattcgcgagtttattttttattttgtttttattttttatatttttcgtggttagtttttagttttacggtttttgtttatatcgtttatttttttttttttggatttattttatcgtttttttttaagtattagtttaatttttgtatatttattaaatttttttttagatattttttggaatttttttttgtcgttttttatagttatttttattttttcgggtatttcgtagttttaggtcgtattttaatttttttttaattagcgattgtttgtttttttagttgagcgcggttttcgcgtttcgttttcgttggcgtttgtagagttttcgggtgggacgtttgtttttagattcggggtttttcggtttttcggggtcgtgttaatcgcggttttaggcgttttttatttagtagggttcgtcgtgtcgcgtcggagtttcgtttttgggagcgttttggttcgcgttttgtttttcgtttcgggttagggaattcgtttacgttcgttcgtttcgcggtttttttcgggtgtcgttgggttcgttatttatagcgttgtggcgttcgcggggatgcgtagcgcgggatcgagcgttcgtagttcgcggttcgagtagttgacgcggtaggcggcgtcgggcgttgggtcgtagaggtaggggggttcgtagggttcgtagtcgcgttcggggtttttcgttagcgtttcgagttataggtttaggtttagggttagcgttaggcgggcgggcgcggcgggcggtatcgttagggtagcgcgcgtatggtttcgtcgtttttaggttcgttcgcgcgcggaggtcgtagtttaggcggggttcgcggacggtatggcgggcgcgggttggatggggttgcggtcgcgatttgttgttgagcgacgttcgttcggggttcggggttaggtcgtttcgggagttcggtcgttcgttcggacgttggcgttgtagtgcgggtttcgtcgcggtttttttttttttttttcgcgcggcgcggggcggacggggcgagggggggcggggcgggtgtaggtttcgtttttttcgttatagcgcgatcgggttagcgatgagggattggtattcggaggttttatttttcgttttatagggtcggtagtagggcggggttttcggaagtttcgttttacgcgttttcggggcgtatgcgacgtggggcggagcgtttggaagtatcgtcgtcgtattgtagagtcggtcgaggagtacgagttattttttacgtttcgtttcgttgtaggttaaagtgcgtgggcgggaagcggtgggtagggtgttatttgtttcgttttttttttgtggtgtgggttaggcggcgggtttttttttttgtagtagttataggttttattttgatttttttttcgcggttgtggatttttttttcgcgattttcgtgcgcggttcgagttagtattcgtagtttttcgacgtattcgttggttttaagtttttttattttaggttttttggttgagagagagatagagggagagagggggaagagagagaataggtaatgggaggttgatggtgagagtttattgaaagataagagggaggaaatttatattttttattttttatttatttatttattgttttatttattttattgaatttttatagttttagaaaaagtgtgttataattattttttttattaaatgaggttattgaggtatagatagtttaagaaatttgttagtagggtatagtggtttatttcggtaattttagaattttgagagggggaggaaggtggattttttgagtttaggagttggagattagtttggttaatatggcgagatttcgtttttataaaaattagttaaaattagttaaattggtttacgtttgtagttttaggtattcgagaggttgaggtcggaggagcgtgtgagtttagtaggtagtggttgcgttgagtcgtgattgtgttattgtattttcgtttgggtaaaagagtaagattttgtttcgaaaaaaaaaaaaatggaaaaaagaaaaaaagaattggttgggagtggtggtttatgtttgtaattttagtattttgggaggtcgaggcgggtagattataagattagaagttcgagattagtttagttaatatggtgaaattttatttttattaaaaatataaaaattagttgggtatggtggtaggtatttataattttagttattagggagtttgaggtagtagaatcgtttgaatttgggaggtagaggttgtgttattgtattttagtttgggtaatagagtaagatttcgttttaaaaaaaaaaaaagaaatttattaggttatatagtaggtggatggtaaggttgcgattgtattttaaatttagtttttaattgtagttaaatgatagatttaagatttaaggattttagtggagggaagaaatagttataagaaattgttgttaaatgagtaaaatagattaattaagttttaatgattgtttgaaggcggttgtggaataaaatgtaattgtttagaaaggattttttaaatagaaaagatatatgtttaaagaagtaaattagttatttggaaatgaaattttaaattatttgaaaaattatgggggtcgggcgtggtggtttatgtttgtaattttagtattttgggaggttaaggtgggtagattataaggttaggagttcgagattagtttgattaatatggtgaaatttcgtttttattaaaaatataaaaattagttgggggtggtgttacgcgtttgtaattttagttatttaggaggttgagataggagaatcgtttgaatttaggaggtggaggttgtagtgagttgagattgtgttatggtattttagtttgggtaataagagtgagattttattttaaaaaataaagaaataaaaaaataaaatttatgtggtgagatagagtaaataaaatgtgttagagattttgtttggtttagggaagaagacgtgagggaaatgttttttgataaaatatagatttgagggtttttattaatagtgaataattgttagtttaaaagggggaaattagaagaggagaaaagaaataagaaagttaggttaggtatagtggtttatatttgtaattttagtattttgggaggttaaggtaggcgggttatatgaggttaagagttcgagattaatttggttaacgtggtaaaatttcgtttttattaaaaatataaaaattagttaggtatggtggtgggtgtttgtaattttagttattcgggaggttgaggtaggagaattattggaattcgggaggcggaggtcgtagtgatttgaggttattttattgtattttagtttgggtgatagagtgagattttattttaaaaagaaaaaaaaaggttaggtatagtggtttatgtttgtaattttagtattttgggaggcggaggtaggtggattacgaggttaagagattgagttattttggttagtatggtgaaatttcgtgtttattaaaaatataaaaattggttgggtatggtggtatatagttgtggttttagttattcgggaagttgaggtaggagaatcgtatgaatttaggaggtagaggttgtagtgagtcgagatttcgttattttattttagtttgggtgatagagtgagattttgttttaaaaaaaaaaaaaaaaaaaaaaaagataggaaattgtaaataaagtaagtgtgttagtattgatattagaaaaataaatttaaggtaaaaggtgttaaatgggaaaagagtttgtttatttatatataataggtatggtttatgtagaatatattatgaattgttgtgtttttaaaaatagaatattggttaggtgcggtgatttacgtttgtaattttagtattttgggaggttgaggtgggcggattatttgaggtcgggagtttgagattagtttgattaatatggagaaattttatttttattaaaaatataaaattagcggggtgtggtggcggcgtttgtaattttagttattcggaaggttgaggtaggagaattttttgaatttaagaggtggaagttgtagtgagttaagattatattattgtattttagtttgggtaataagagtaagattgtgttttaaaaaaaaatataaaatatatatatatatatataaaaataaaatagaatattaatttacgaagttaaattgtgaaatataaagattttgaaaaataaagatattgtaggagggtttattatattttttttcgaagtttatagattaagtagatttaggaggttgacgttgtagtgagttatgattatattattgtattttagtttggggaatagggtgagatgttgttttaaaaagtttatagattaatttttgtttggatatagtggtttatgtttgtaattttagaattttgggaggttaaggaaggaggattattgaggttagtttggataatatagagagattttatttttttttttttgtttgttgttttttttttttttgagacggagtttcgttttgttatttaggttggagtgtagtggcgcgatttcggtttattgtaagtttcgtttttcgggcgtacgtcgtttttttgtttcgtttttcgagtagatgggattataggcgttcgttattacgttcggagaattttttgtatttttagtagagatagagttttatcgtgttagttaggatggtttcgattttttgatttcgtgatttattcgttttggttttttaaagtgttgggattataggtgtgagttatcgcgtttagttaagagattttatttttataaaaaatataaataaaaaattagttaggtatagcggagttcgtttgtggttttagttatttgggaggatgaggtgggaggtttatttgagtttagaaggttaaggttgtagtaagttatgatggtattattgtattttagtttatatgatagagtgagattttgtttaaaaaaaaaaagaaagagagagagataatttttttttttttttgaaatagaatttcgttttgttgtttaggatgttggagtgtagtggtacgattttagtttattataatatttgttttttaggtttaagtgattttcgtgttttagttttttgagtagttgagattataggcgtgtattattatatttggttaatttttgtaattttagtagagatagggttttattatgttggttaggttggtttttaatttttggttttaagtgatttatttgtttcggttttttaaagtgttgggattataagcgtgagttatcgtattcggttaaagagataatttttttatgttagtaaagatatagagattttgagtagtatagttaataagttgtattgtatataaaatagggcgtgttaattattttggtattatagatgttaggtaaggttagaggaaaagtttagataagaacgtggtttttggtcggacgcggtggtttacgtttgtaattttagtattttgggaggtcgaggtgagtggattattaggttaggggatggagattattttggttaacgtggtgaaattttgtttttattaaaaatataaaaattagttgggtgtggcggtgtgtgtttgtaattttagttattcgggaggttgaggtaggagaatagtttgaatttaggaggtggaggttgtagtgagtcgagatcgcgttattgcgttttagtttggtgataaagttagattttattttaaaaaaaaaaagaaaagaaaagaaaagaaaaaaaagaacgtggttttaaatattatcgttttttagaggtttttttgggtatttttatttgtttattgtattaaattttgaaattagattaaaattgaagtttttataagtatagtttaatttagggatttttatttgagtagagaggtcggaagaattat

SEQ ID NO: 123 - DNA, 6763 bp, Artificial Sequence
  chemically treated genomic DNA (Homo sapiens)
taaaattataaatggttttagggttaaattattggaatatattaatttttttatttatttatattttgtaaaatttgttaaattatattggattttaaagatttatttggtttgatttgagaaattagtgaaaagttaaattttattgtggttttttataattttattaagtttggtttttataattgtttattattggaatattttaatataaagggtagatgttttattttattgttattatttggataatttgatgttatttttgaaatgtgtgtggtgtggttatggatatttgtagtattggaatagagaagggaggagatgtgagggaattcggagagtttaaggtatttgttttgaaaattatatattttaatgagaagttttggattatgattgggagattaaaatgataatttatgtattgagatgaattttatttggaaaggggaaatggaatatttagttgttgttttataaaggttggtaatttttgttggttgataaggttttaagtttttatttatttttatttggtaattgttataaggggtgttagaggtagaagggttatttaaagggattgttttttcggaggatattttagtaggtttggttgttttagtttgtattttagatttgtggaatttttgtggttagttgaagttaataaattcggtgtggtatagtagttttttgtatagggtatgtatattaaagtcgataatgtttataaatgtaaataagggtagattgattaggaataatattatcgttgggaatgtcgtattcgtatgtattagtaatgaggtaaattgggggtagttttagttttgattatttaagtcgagtaggtttttatattggtttttttttttttttttaaaacgttatagaaataaggttaattagatttttaaagtaatttatttttaagtatgaaaaaagtagattataggggaagcggcgggtggggggtggggagattaagatagcgttcgttagagtcgaggtttcggagtgcgttttggaatttacgggtagaatttataggtcgggattattgtttgagatgttgaaaagttaatttattaaatagcgggcgagggggtttagggtattgaaagtttcggggattaatgtttaaaacgtttaggaattaagttaaattaagggatatgggtttgagtggaagaggttttgttattgaaatgacgtgtatgtggtagtcgtcggaattagaggatatgtagtcgcgtgcggagagtgaggcggatttattacgggtatatagtttattatttttttttagaatttttttttttaaataagttatattgaaatttttttagtaaaagattgagacgaaatattaatagttttgggttaaaacgtggtggagaagtttgaaaagataaatatagtaacgtgtttttggttatatggttttttgttttttagtaagtttgaaatataaaaaggttaatatgtaaaattaggggtattattttttttttttagtttttaaaaagtaatttttagaagtaaatatataatggttcgatttgaagtgtcggtataattatttagtaagaaaagttagaatagtaaatttttttttttgttttgtgttatttattaaatttaataaatattaggatcgtatttaaagatgaaattggtaatgtgtggagtcgtttgagttttttattaatttagtgttatttttttcgtatgttgttcgtttgtttttcgagttttcgtagtttttttttgaggtatttataaaattacgtgttttttaagcggtttgagttttgaattttcgcgttggttcggtgtttaggttttttttcggatttcgcgaacgtttttaaatatttttatttcgtttttttttttttttcgggatatttcgttttgatttcggtatcgtatacggtttgcgggttagggggtcgggggaagggtttttttttgaagtcggggaggaggagaggttggagggaaggtggttaggttggtgggggaggggagattgagggagggagcggggcgagggaggaaggagaaggcgtaggtcgaaggaaggaagcggggaggggaaatcgtcggggaggaaggaagggggcggggagagtcggcggacgggttttttgcgggagtcgcgtggatcgtttcggtggtcggcgcgtttcgtcgtagtttttagcgcgttcgggtagttagcgcggggtcgttgaatgggtagggattcgtgagcgcgattattggtcggtcgcggggaggcggcgcgggtattgggtagcgtaagggggtcggttcgtttttaggaatgtattacggcgcgttcggtacgttcgttcgcgtcggttgggcgcgcgtttcgtttgggttttcgggagatcgcgttggaggttcggagtcggttcggcgtattcgtttttttatttattttgtttcggtcgcgcgggcgcggggagttcgggagtcgggcgcgcgcgcgtatcgggttttttggcgcggggttacgtggttatcggagtttcgttttttttttgtttttttttttttttttttatttgggtttttttttttttttttttttttttttttttttttttttaatgaatatatatcgtgcgtattttaaagttatatcgttttattttacgattttattagatttttcgttattgttagtttttttgtagtttaatttcgtttaaaaaaaaaaataaagtgaagtaaattaagggtttgcgggtcgggtttttatcgtagggaggaacgtaataatttggaaacgtaagaaaaatatattttattttttcgaaaataaaaatttttttaaataaaaagtttagttgtgtagacgtgtttggttttagaatttattttaaagggtcgcgtgtttttttttttcgcgggaagcgaattttcgggatgttttggtgatattggacgcggtgtcgggacgaattttcgcgattcgcgtatagtttgtttttaatgaatttagtatcggggtatttataattttttacgttatattattattaaatataatatgtatatcgagttttgtaaaaaaaaatattgattatataaatatttggttaataaaaaggggtgtataaatgaatttaaaataattaggaaaattttatttttttaaggaaataatttcgtttttttaagttgtaaaaaaagattttgttgttttttttttatttatgttatattcgagatttaaataaaaacgtttttgtttttataagattgtttcggtgtttggattttacgtttatagaatattgatttttttaaattaagattgtgttttttttttttttaagttggggggagaaagcggttggggggtagacggattttaagaaagatggttttttttaacgtttttgtttttttttttaattttttattttgtttattttaatgcgaggcgttgttttttgtaagagtttaagttttttttttagttataaaagaaaagagaagaggaaaaaaaaatttggtatatattggcgtattatttagtacgttgttattattggtgtaggtttgggaatgcgagtcggattttttagtatttgttgtagtttgaggttaaggtgtttttgaaaggtttttttttgaggaattttagaaattgtttaagcgtttaaaaaaatattatattttttttcgtgtttatcgcgaggtaaatgttcgtgtgtgtgcgtgcgcgcgcgtgtgtgcgcgtaaaggtattttataaaaagaagatattgttgaaaagaaaaggaataagagagaaaggagggggagtattttttaatggaagtattgtatgcgagaaggttggcgtttttagaggttgtttcgaagtcgaggatgtatatattgggttgtttatttgggtggtttttttattttggtgagttgttgttaagtagttaataatagttatgtttgttgagtaatttttgtttttcgcgagttaatcgcgtcgtagaaatttaagttatttgatagtttcgggggcgggagttttagtttttttttttttcgttcgttttttttttttttatttttttttttttttttttttttttttttttttaaatggagagagtttttttttttttttttttattttatttattgaattaaggagttgttgcggtcgttgttcgttgtatatatatagagcggagtttttaggtttcgggagcgagagaggcgcgttgtacggggatagaatggtttagcgggttgtcgaggagtataagaaagtagagttcgggatcgagtagttatcgcgaatttagtagttagagttcgagtagttcgagtagtagtttttggagtcgttatcgttagtagtagttatcgcgggagtagcggtagttgcggttgttcgggttcggtagcgttgagattcgtcgggtattttcggatttcgcggcggcggcggttttgcgtttgtttttcgcggtcgttcgggcgattcgggaggcgtcgagagagttagcgcggtcggcgggagtagcggggattcgttggttttttttgtagtgaaggggtcgcggcgcggggcggggggcgggtagggggagttggggatcgtaaggagtgtcgcggaagcgttcgaaggataggttcgttcggcgcgtcggttttcgttttttcgcgaattggatgtgggtagcggcggtcgtagagatttcgggattttcgcgtaatgtggtaatggaaggcgtagggtttgatttttcggtagcggtcgcggtcgtagcggtagtagcgttcgtcgtgtgagtagtagtagcggttggtttgttaatcggagttcgagttcgagtagtttgcggttagtagcgttttcgtaagtcgagcgtttaggcgcgttaggagttcgtagtagcggtagtagcgcgtcgggtcgttcgggaagttttcgttttcgcggcggcggcggcggcggcggtaatatggtttcggttggtaacgtcgtcgagttttaggatcgcggcggcggcggtagcggttgtatcggtgtttcgggacggtcggttggaggcgggaggcgtagacggacgggggggttgcgtcgtgttgtcgcgtcggatcgggattatttgtatcggtttagttattgcgacgtcgttttcgttttggagtagatttttaaggtgtattttagattttttttttttattttttttttttttttttaattttttgggatcgttttcgttatatataaatatatatatttttttttttttttttttatatatatatatatatttatttatatttttttaggaaaagtagtagataaatggggattgaaaaatttaaattttttttttggttttgggaggaaagggttgtttgaggttcgtagggggtggaggtgtgtgtgtgtgcgtgtgtgtgtgtgtatatatacgttttttttggtgtgtttttttcggagtattggaaagtcgtttacggcggattattttaagggcggtcgcggtattgttttgtttcgtgttttttgttttgaattttttttttttgcgtttttgtttttatttgtagtttaaatttttgtacggttgttatattttttaatattttggagggggaggcggagtggagagaggcggagagaggaaggggggagggagtcgaaataaaggtggtttttttttttggtagttagttttggttttgttgagtatgaaatttttgtttttttaaaaaattattttcggaaaaagatatttttttcgttttttaggttttgagtcgtttttttttagggtttggtcgggggaggaaaagttgtaaataaattgttattttaaattcgcggtgcgagtttgcggagttgtcgggtttattgtgtttacgaggttcgttgaaatgtgtggaatttagggaaggcgagtatttagacgggggttcgtcggggtcgcggttagcgtcggggaaatgtcgcgtcggggagtagtttgcgtcggtttgagtttttttttttgtattcggttgttttttacgtttaattagaaaggaagggagaggagggaaagatttatgtggttgttttttttcgattataaatattgtcgtaagttgtagttggttgttttattttttaatttagtttatatagtttttttttacgttatggaaatgcgtcgggagtgaatttcggcggtcgcgtttattacgtggatttttatttattattattttcggcgggggtttagttgggggaattcgtaatatgttgttttaaagagcgttcgtttttagcgttcgttttcgagggtgatggatagagtaggattggtttgttggtttttgaattttgggttttatcgttgggattacgtagtttttttttttttagttttggggtgaatattgtttgtgtcgagtggttttttttttttttatttcggtttttttttttgtattgtagttttagtgttttaagtcgtttagggatttcgcgggtgggggcgttttgatgttttcgaggtgtagtttttacgttgcggttcggttttatgatcgagttttttatgacgtttagattcgtcggggttgtagtttcgagggcgagttcgtgtgtcgcggttattcgcgtttttacggttgttgggggtttatcgggcgggtgcgcgtaagcgggcgtgggcgcgcgggtcgcgatttttcggcgtttattttttttttttgtttcgtttttagg

SEQ ID NO: 124 - DNA, 6763 bp, Artificial Sequence
  chemically treated genomic DNA (Homo sapiens)
tttggggacgaagtagaagggaggagtgagcgtcggggagtcgcggttcgcgcgtttacgttcgtttgcgcgtattcgttcggtgagtttttaatagtcgtgggggcgcgggtggtcgcggtatacggattcgttttcgagattgtagtttcggcggatttgagcgttatggggggttcggttataaagtcgggtcgtagcgtgggagttgtatttcggggatattagggcgtttttattcgcgggatttttgagcgatttggggtattggggttgtaatatagaagaggaagtcgaggtagagaggagagaaattattcgatatagataatatttattttagagttgagaagggaggggttgcgtaattttagcgatggagtttaaggtttaggagttagtaaattagttttgttttgtttattattttcggggacgggcgttaggggcgagcgttttttggaataatatattgcgggtttttttaattggattttcgtcgagaatggtagtaagtggggatttacgtggtgagcgcggtcgtcggagtttattttcgacgtatttttatagcgtggggagaggttgtgtgagttgaattaggaagtggggtagttagttgtaatttacgataatatttgtgatcggaagagggtagttatatggattttttttttttttttttttttttttggttaaacgtaaaaaatagtcgagtgtaaagggaagggtttaggtcggcgtaggttgtttttcggcgcggtattttttcggcgttggtcgcggtttcggcgggttttcgtttgggtgttcgttttttttggattttatatattttagcgagtttcgtaaatataatgaattcggtagtttcgtagattcgtatcgcgaatttaaggtggtaatttgtttataattttttttttttcgattaggttttaaggagaggcggtttaaaatttggaaaacgggggggatattttttttcgagaataattttttaagggagtagagattttatgtttaataaaattaaaattggttgttaaaaaaggaaattatttttatttcggttttttttttttttttttttttcgtttttttttatttcgtttttttttttaagatgttaagaaatgtggtagtcgtataggagtttaggttgtaaataggggtaggggcgtaggaggaagaagtttagggtagggggtacggggtaggatagtgtcgcggtcgtttttgaggtggttcgtcgtggacggttttttagtgtttcggaaaaggtatattagggagggcgtgtgtatatatatatatatacgtatatatatatatttttattttttgcggattttagatagttttttttttttaggattagagggagggtttgaattttttaatttttatttgtttgttgttttttttggagaggtgtgagtgagtgtgtgtgtgtgtgtgagagagagaggaagagagtgtgtgtgtttgtgtgtggcgggggcgattttaaagagttagaggagggaagagaaagtgggaggagagagtttgaaatgtattttggaaatttgttttagagcgaaggcggcgtcgtagtagttgggtcggtgtagatagtttcggttcggcgcggtagtacggcgtagttttttcgttcgtttgcgtttttcgtttttagtcggtcgtttcggggtatcgatatagtcgttgtcgtcgtcgtcgcggttttggggttcggcggcgttattagtcgaggttatgttgtcgtcgtcgtcgtcgtcgtcgcggggacggaggtttttcgggcggttcggcgcgttgttgtcgttgttgcgggtttttggcgcgtttgggcgttcggtttgcgaggacgttgttggtcgtaggttgttcgggttcgggtttcggttgatagattagtcgttgttgttgtttatacggcgggcgttgttgtcgttgcggtcgcggtcgttgtcggggagttagattttgcgttttttattgttatattgcgcgggggtttcgaggtttttgcggtcgtcgttgtttatatttagttcgcggaagagcgagagtcggcgcgtcgagcgagtttgtttttcgggcgttttcgcggtattttttgcggtttttaattttttttattcgtttttcgtttcgcgtcgcgatttttttattgtagaaagagttagcgaattttcgttgttttcgtcggtcgcgttggttttttcggcgtttttcgggtcgttcgagcggtcgcggagggtaagcgtagagtcgtcgtcgtcgcggggttcgagggtgttcggcgggttttagcgttgtcgggttcgggtagtcgtagttgtcgttgttttcgcggtggttgttgttggcggtggcggttttaggagttgttgttcgggttgttcgggttttggttgttgggttcgcggtggttgttcggtttcggattttgtttttttgtgtttttcggtaattcgttggattattttgttttcgtgtagcgcgtttttttcgttttcgggatttggggatttcgttttgtgtgtgtgtagcgggtagcggtcgtagtagttttttgatttaatagatgagatggaagaagaaaaaaaagaattttttttatttggagaaagaagaggaggaggggaggggagggggtggagggggagagagcgagcgaaagagaaaaaggttggagttttcgttttcggggttgttagatggtttgggtttttgcgacgcgattggttcgcggagggtagaaattatttagtaaatatgattattattagttgtttagtaatagtttattaaagtagagagattatttaggtaggtaatttagtgtgtgtattttcggtttcggggtagtttttgagagcgttaattttttcgtatgtaatatttttattaaggaatgttttttttttttttttttttattttttttttttttaatagtgttttttttttgtgggatgtttttgcgcgtatatacgcgcgcgtacgtatatatacgaatatttgtttcgcggtagatacggggggaaatgtaatatttttttaagcgtttaaataatttttgaaattttttaaagaaaagttttttagaggtattttggttttaagttgtagtaaatattgggaggttcggttcgtatttttaggtttgtattaataatgatagcgtgttggatagtgcgttagtgtgtgttagatttttttttttttttttttttttttttataattaaagggaagatttaggtttttgtagggaataacgtttcgtattaagataaatagaatggaaagttaaagaggaaagtaaggacgttgggaaaagttattttttttaaaattcgtttgttttttagtcgttttttttttttaatttaaaaaaaaaaaaaatatagttttggtttgaaggagttagtgttttataaacgtggaatttagatatcgaagtagttttgtagaggtagaggcgtttttatttgaatttcgaatgtgatataagtaaaagagaaataatagaatttttttttataatttagagaaacggaattgtttttttgagagagtaaagtttttttgattattttgggtttatttgtatatttttttttattaattagatgtttatatagttagtatttttttttataaaattcggtatgtatgttatatttaataatagtatgacgtaggagattataaatgtttcgatgttggatttattgaaaataaattgtgcgcggatcgcgaggattcgtttcgatatcgcgtttagtgttattaaggtatttcggggattcgtttttcgcggagggggaaaatacgcgattttttgaggtggattttggagttagatacgtttatataattaggttttttatttaaaaaaatttttgttttcggaaaagtggaatgtgttttttttacgtttttaagttattacgtttttttttgcggtaggaattcgattcgtaaatttttgatttgttttattttatttttttttttaaacggggttgaattgtagagggattggtagtagcgagaagtttagtgaagtcgtgaaatggggcggtgtggttttaagatgcgtacggtgtatgtttattgaaaaaaaaagaagaaagaaaggaaaggaaagaaagaaatttagatggagggaaagggggaggagtagggagaaggcggagtttcggtggttacgtgatttcgcgttaggaggttcggtgcgcgcgcgcgttcggttttcggatttttcgcgttcgcgcggtcggggtagagtaggtagggaggcggatgcgtcgggtcggtttcgggtttttagcgcggtttttcgagagtttaggcgaggcgcgcgtttagtcggcgcggacggacgtgtcggacgcgtcgtagtatatttttgaaggcggatcggtttttttacgttgtttaatgttcgcgtcgttttttcgcgatcggttaatggtcgcgtttacgagtttttgtttatttagcggtttcgcgttggttgttcgggcgcgttgggggttgcggcggggcgcgtcggttatcggggcggtttacgcggttttcgtagggggttcgttcgtcggtttttttcgtttttttttttttttttcggcggtttttttttttcgtttttttttttcggtttgcgtttttttttttttttttcgtttcgtttttttttttaatttttttttttttattagtttggttattttttttttagttttttttttttttcggttttagggggaggtttttttttcgattttttaattcgtaaatcgtatgcggtgtcggggttagggcgggatgtttcgaggaagagagggagacggggtggaggtgtttgggggcgttcgcgggattcggagggggatttgagtatcgggttagcgcggaaatttaaaatttagatcgtttaaggagtacgtgattttgtgagtgttttagggaagggttgcggaaattcggaaagtaggcgggtagtatgcgaggaaaatgatattgagttgataaagagtttagacggttttatatattgttagttttatttttgagtacgattttgatgtttattaggtttgataaatagtataaaataggaaaagaggtttattattttagttttttttattgaatggttatgtcgatattttaagtcgaattattgtgtgtttgtttttggaaattgttttttaaaaattgggggaggggggtagtatttttagttttgtatgttagtttttttatattttaagtttgttggagggtaaggaattatatagttaaagatacgttgttatgtttgtttttttaaatttttttattacgttttggtttaaaattattagtgtttcgttttaattttttattagagggattttagtatagtttgtttggaagaaggaattttggaaggaaatggtaagttgtgtgttcgtaatggattcgttttatttttcgtacgcggttgtatgttttttggtttcggcggttgttatatgtacgttattttagtggtaaagttttttttatttaggtttatattttttagtttgatttaatttttaaacgttttgaatattgattttcggagtttttagtgttttgagttttttcgttcgttgtttgatgggttaattttttagtattttagataatggtttcggtttgtaaattttattcgtgggttttaggacgtatttcggagtttcggttttaacgagcgttattttaatttttttattttttattcgtcgttttttttgtggtttgttttttttatatttagagatgaattattttgaggatttaattggttttgtttttgtaacgttttaagaaagggaagaggagttagtgtaaaagtttgttcgatttgggtggttagggttgaggttgtttttaatttgttttattgttgatgtatgcgagtgcgatatttttagcgataatgttgtttttaattaatttgtttttatttatatttgtaagtattgtcggttttaatatgtatgttttgtgtaggggattgttgtgttatatcgggtttgttaattttaattaattataaggattttatagatttgagatgtagattggggtagttagatttgttaaggtgtttttcgggaagatagtttttttaaatggtttttttgtttttggtattttttgtgatagttattaaataaaaataagtgagaatttggggttttattagttagtaggagttgttagtttttatgaagtaatagttgagtgttttattttttttttttaagtaaagtttattttaatgtataaattgttattttggttttttagttatgatttaagattttttattggagtgtgtagtttttaaagtagatgttttaagtttttcggatttttttatatttttttttttttttgttttaatattataaatatttatggttatattatatatattttaaaaatgatattagattatttaaatgatgataatgaaataaaatatttgttttttgtgttgggatgttttaatggtaagtaattgtggaagttagatttggtggagttatgaaaaattatagtgagatttaattttttattggttttttagattaaattaaatgagtttttaaaatttaatgtaatttggtaagttttgtagagtataaatgaataaaggggttaatgtattttagtaatttgattttggggttatttataattttg

SEQ ID NO: 125 - DNA, 6172 bp, Artificial Sequence
  chemically treated genomic DNA (Homo sapiens)
gtatatgttatagtatggaggaaagttgaggatattgtattaaatgaaataagttagttataaaaagataaatattgtatttttttaaatgagttgaaaattttgtttataaaaaaaattgcgtatgaatgtttatgttagttttatttattattgttaaatatttagaataaattaagatattttttagaaatagatgaattggtatatttatataatataatattgtttagtaagaaaaaggaatgtgttattaagtcgtgaaaagatttggaggaattttaattttatattgttagatgaaagtagtcgatttgaaaaggttgtatattgtgtgtttgtttgtagttattcgatattttggaaaaggtaaaattataaagatagtaaaaagattagtggtcgtaaggggttgggaggagggaggaatgagtaggaggatataaggaatgttttgggttgtgaaaggttttgtaggttattgtaatggtggagatatgttattatgtattcgttaaaatttatagagtgtatattattaagagtgtagtttgatgtgaacgagggattttagcgaatgagagtatgttagtattggtttgttagttgtaatagatgtattatattaatgtaataggttaattataggagaaatcgtgtgtggtagggtgcggagaggttaatgagaattttttgtatttatgatttaatttttttgtaaatttaaaattgttttttaaaaaaaggtttattaatttaggaaggaaggagggaaggaaggaagaagtaaggaaggaagggaggaagggagggagggagggaagaagggtgggaaggaaggaagggaaggaaggaaggagggtgggaaggaagggagggagagaggaaagaaggaaagaaggaaagaagaaaggaagaaaggaagagggggtttttttttatatagggtttggtttttggtgggtttttgttaggtgtgaatttttatttagtttttattttagggtattggtttttttttttttttagtttatggtttatttttttaggtgtgtaattaggttttcgtttgttttgggtaatatttttattttttagtttggtagtgaaggtttttatcggttgttttagttttttgttatttttatttattgttattttttttagttattgttttgagtatttagggaatattattatttagcggtgcgtagatggttttggtttttttagggttttagttggttaagtttttttttagtttgagtagttttgtttatttgtttttttgtttgataaattgttatttagtaggtaggtttttgtttggacgttaatttttttaggaagttttttttgaatttttttttgtaatttaggattggggtttttggtttttgaattattttattataggatttaaagattgtagttgttttagggtagggttttgttttggatagtatgtatttttaggttttggttgggagtgggcgttcgttgtaatttaagagtatttaaaggattatggagatatagcgtttggggagagtaatgtagtagtggttttagaattttttttaaggtagttaggttatttttgttttaagaaaggtttgttagttgtgggacgatgtttacgtgaggatatttaatagtattgtttgtgatagtaaagtttttaaaaatggtatttattagaaggggaatggttaaataaattaagatatagttaaattagagaattttaagtagttattaataagattgagttttatttgtagatattgatatttttttttttttttttttttttttttttttgagatggagtttcgttttattgtttaggttggagtgtagtggtatgattttagtttattgtaattttcgttttttaggtttaagttatttttttgttttagttttttgagtagttgggatgataggcgtgtattattatatttagttaatttttttttttttttttttttttttttgcgatagggtttttttgtgttatttaggttggagtgtagtggtgtaattttagtttattgtaattttcgtttttcgggtttaagtgatttttatgttttagttttttaagtagttgggattttaggtgttcgttaagatgtttggttatttttgtatttttagtagagataaggttttattatgttggttaggttggttttgaatttttgattttaagtgatttatttatttcggttttttaaagtgttgggattataggtatgagttatcgtattcggtttttattgtgtttttgttttgatttttgtttttaggagatgggcgtttttagagtatgggtttatgttgatgggaaagttattatttttatattacggaatattatttagtaatgaaaaggaatatatttttgatgtatatagtttggatggagtttagatgtagttttttaaatgaaagaagttagatttaaaaggttttttattatataattttatttataggatatttggaaaaggtaatatttatagaaaatcgatgagtggttgttaggagttaggggtggggaaggagttgattataaagggtgtagggaagttttggggatgagtaaattgttttagattttaattgtagtggtggttatataattgtatgtatttgaaaatagattgtataataataagggtaaattttattgtgtgtaaaatatattttagtttttttttttttaagaaaggaaaaaattatattttttttttaatattatatgtttttttttttttatttattttgattgtaatataaatttgaattattaaaatattttagatcgggcgtagtggtttatatttgtaattttagtattttgggaggtcgaggcgagcgaattgtttgaggttaggaggttaaggattagtttggttaatatggggaaattttatttttattaaaatataaaaattagttagttatggtggcgtgcgggtgtaattttagttattcgggagggtgaagtaggagaatcgtttgaattttggaggcggaggttgtagtgagtcgagattgcgttattgtgttgggattataggtatttgttattatattcggttaatttttgtatttttagtagagatggggatttatcgtgttagttaggttggtcgagaatttttgattttaggtgatttgttcgtttcggttttttaaagtgttggggttataggcgtgagttatcgcgtttggtcgtgagtgatttttaaaaaatgaaaagattttattaaattttttttgattttagttttttttgttgtgagtagtagagaaaggtaagattttaaaatttttatttttttattatattgggttgaagggatttgtggagttattttttggtagaggtagaattttcgaaaagggtatttttaatttatagggatttttcgagttcggttggattttcgtggtgtcgtgttgtgagattatttattatttaggtatttagcgagtttatatcggtttttaagaattttgatgaaggtttttttgttttttagatagatttggggagacggatattttaaaagcgagagttttttgaggttaaataggtgtttaggagtaggggtataagtaggttattattttttagtgttgtgaggaggagtggggggatgagatggggacgtaggaggttgttcggttttagagtttgttttacggtggaaggtggaggagagtttagggttttacggttagtttttgcgtggtttaggaaggtttaatttttttaaagaggaatattggatatttttcgatatttttttggtttttagtttaggtcgatttaagtttttgtttttcgtttagggaagataggggaggacgacgttatttttggttttagggtttaggtgcgaaggtcgtttggtattattttttttgtttgttagatgtgggtagggttcgttcggttttttttttttgttttttcggtcgttttttttatattcgtaggttttttatagttttttgaattgaggtttagggtttcgtaggggatttcgaaggagtagtaattgtacggtgttttttagattcgcgtgttcgaggttatcggggaataaagaagttatttatttttttttttagtttagatgaagagagagggcgttgttttttatagaaaaacgttgcgaatttcgttttcgttttttttttttttgtagttttttcgtgcgggtgtagttgtttaaattaaggttttaagtttttagtattttgtggagtgtaggaagaacgcgagcgtacgggagaatttgggtcggcggggcgtagcgagtcgtatcgtagttggaggatagtcggggtgtgtttgtgtgtgtttgttcgtcggttgaaggttttatcgttttcgggttttcgttttgttttagaaagcgttttttaagagagttaggagttttgcgtatttggagcgcgtttcgcgtttacgtttagagggcgttgtatattcgcgttcgaggattgtttgtttttttttagtttttttttcgggttgcgttttcgtatttcgggttcgggtagaagggggtgcgtttcggttttattatttagggagtagtcgagttgaaaggtcgggaatcgcggtttgcggggattatagttttcgaaagcgacgttcggttatcggaggagcgggagttaagtaggtaagaattttaggagcgggtcgggggtggggcgtttcgaaggggtcgggaggggtggttggggggcggggttttggggggtgtggattggggttggtcgggagatttggcggagttgggggtggggggttagtttttgtaacggttaaggaagggtttgtgggtttattataaggcggagttcggcgggagaggtgcgggtcgaattcgagtcgagcggagaggaattcggtagtagagagcggattttagtcggcggattttgtagttttcgtttgggatagcggcgcgttgggtaggcgtttaagagagtatcgagtagcggaattcgcgaagtcggttcgtagtcgcgattcgcgtagtttgtcgttttttcgtcgtcggttcgggtagtatgaggcgcgcggcgttttggttttggttgtgcgcgttggcgttgagtttgtagtcggttttgtcggtgagtgcggtcggcggttaggcggggaggcggcgggaagtcgggattggttattcgcggatgtcggcgggtgtacgtggagggggagggggagcgaagatttttttttttttcgcgttagtttagcgggtttcgggacggtgagtttcgagattagggttttagttttaatttttttcgttgtcggtgggtgtcgtatcggtttcgcgttggggagggtggggggtcggggtttcgcgtttaattatgtaaaacgtttttatatttgtcggagttcgttagtttatagcggcgttcggggtcgttcgtttttatttttttcgtttcggttatcgcggcggtcgggttttcgtcggtgattcggggggatgtagtgatcgcggttataacgttttttttgtagattttaatttaaattagattcgcgggtttgcgttttagcgtcgtcgagttcgggcgtttcgttttttgcgttagggtaagtttgggcgtagcgcggtcggcgcgggagcgggaggcggtcgcgttggttcggggagtcgggttagggttgcgtggggggcgcgggcgagcgtttgtagggttttcgggtttgtcgtgggcggttcgaggtgagttgagtcggttcggtagcgggaggtttcgggaagttggtttcggaacgttggagattcggaggagtttaatttttgggttgttgaagttgagttggtttcggagggcgcgttttcgtgtcgggtacggtcgaggcgtaggcgttttttacgcgaggggattcgggaatggtttttcgtttttcggttcggttttgtgttgaagtcgcgcggagggaaggcgggttttttggttcgtttagtgtagttgggagaaaagaggggtagatgtggagttcggggttgtaagaggtttttgggtgggatgtagtatttatttttagcggggttgacgttttattaaagagggacgtggtcgataaagagtagtttgagggtttttagaa

SEQ ID NO: 126 - DNA, 6172 bp, Artificial Sequence
  chemically treated genomic DNA (Homo sapiens)
ttttggggatttttaggttgttttttgtcggttacgtttttttttagtggagcgttagtttcgttgaaggtggatgttgtattttatttaaaggttttttatagtttcgagttttatatttgtttttttttttttttagttgtattgggcgggttaagggattcgtttttttttcgcgcggttttagtataaagtcgagtcggggagcgggaggttattttcgggttttttcgcgtggaaggcgtttgcgtttcggtcgtgttcggtacgggaacgcgtttttcggggttagtttaattttagtagtttagaagttgggttttttcgggtttttagcgtttcgaggttaatttttcggaatttttcgttgtcgggtcggtttagtttatttcgagtcgtttacggtaagttcgagggttttgtagacgttcgttcgcgttttttacgtagttttggttcggtttttcgggttaacgcggtcgtttttcgttttcgcgtcggtcgcgttgcgtttaaatttgttttggcgtaaggggcggggcgttcgggttcggcggcgttggggcgtaagttcgcgggtttggtttgaattagggtttgtagggggggcgttgtggtcgcggttattgtattttttcgggttatcgacgggggttcggtcgtcgcggtggtcggggcgaggagggtgggaacgggcgatttcgggcgtcgttgtgggttggcgggtttcgatagatgtggagacgttttatataattgagcgcggggtttcggttttttattttttttagcgcgggatcggtgcggtatttatcgatagcggaggaaattggggttggagttttggtttcggggtttatcgtttcgggattcgttgggttagcgcgggaagaagggaagttttcgttttttttttttttttacgtgtattcgtcggtattcgcgggtgattagtttcggtttttcgtcgttttttcgtttggtcgtcggtcgtatttatcggtagggtcggttgtaggtttagcgttagcgcgtatagttagagttagagcgtcgcgcgttttatgttgttcggatcggcggcgggagagcggtaggttgcgcgggtcgcggttgcgggtcggtttcgcgggtttcgttgttcgatgtttttttgggcgtttgtttagcgcgtcgttgttttaggcgagggttgtagggttcgtcggttggagttcgttttttattgtcggattttttttcgttcggttcggattcggttcgtatttttttcgtcgagtttcgttttataataaatttataggtttttttttagtcgttgtaaaaattggttttttatttttagtttcgttaggtttttcggttagttttagtttatattttttaggatttcgttttttagttatttttttcggttttttcggaacgttttattttcggttcgtttttaaggtttttgtttgtttggttttcgttttttcggtggtcgaacgtcgttttcgggagttgtggttttcgtaagtcgcggttttcggttttttagttcggttgttttttgggtggtggggtcgaggcgtatttttttttgttcgggttcggagtgcggaggcgtagttcgggagaggggttgaaggggggtaggtagttttcgggcgcgagtgtgtagcgttttttgggcgtggacgcggagcgcgttttaggtgcgtaggatttttagtttttttggggaacgttttttggggtagggcggggattcgggggcgatggggtttttaatcgacgggtaaatatatatagatatatttcggttgttttttagttgcgatgcggttcgttgcgtttcgtcggtttagattttttcgtacgttcgcgttttttttgtattttataaagtgttggagatttggggttttagtttaaatagttgtattcgtacggaagggttgtaagaaaaagggggacgggggcggagttcgtagcgtttttttgtggaagataacgttttttttttttatttgagttaaaaggaaaaataagtaatttttttgtttttcggtgatttcgggtacgcggatttgaggagtatcgtgtagttgttgttttttcgagattttttgcgaggttttgggttttagtttaaaaagttgtggaaggtttgcgggtgtaggggaaacggtcgagagagtaaaggggaagaatcggacgggttttgtttatatttggtaggtaggagagatggtgttaaacgattttcgtatttgggttttgagattaaagatggcgtcgtttttttttgttttttttaggcggaaggtaagaatttgggtcggtttgagttggggattaagaaaatatcgggaagtgtttagtgtttttttttaaaagaattaaatttttttgggttacgtagggattgatcgtgggattttggatttttttttattttttatcgtggagtaggttttggagtcgagtagttttttgcgtttttattttatttttttatttttttttatagtattaaaagatgatggtttgtttgtatttttgtttttgagtatttgtttgattttaaagagttttcgtttttggggtgttcgtttttttaagtttgtttagggggtaggaagatttttattagggtttttgggggtcgatgtgggttcgttgagtgtttgagtgatggatggttttatagtacggtattacggaggtttagtcgagttcgaggagtttttgtggattaaaaatgtttttttcgaaggttttatttttattagagggtggttttatagatttttttaatttagtatggtggaaaaataggaattttggaattttatttttttttattgtttataatagaggaaattggggttagggaggatttgatggagtttttttattttttaaaagttatttacggttaagcgcgatggtttacgtttgtaattttagtattttgggaggtcgaggcgggtagattatttgaggttaggagttttcgattagtttggttaatacggtgaatttttatttttattaaaaatataaaaattagtcggatatggtggtaggtgtttataattttagtatagtggcgtaatttcggtttattgtaattttcgtttttagggtttaagcgatttttttgttttattttttcgagtagttgggattatattcgtacgttattatggttggttaatttttgtgttttagtagagatggggtttttttatgttggttaagttggtttttgattttttgattttaggtaattcgttcgtttcggttttttaaagtgttgggattataggtgtgagttattgcgttcggtttgaaatattttaataatttaaatttatgttatagttaaaatgagtggaaaaaagggggtatgtaatgttaaaaagaaaatgtaattttttttttttttaaaaaaaaaaaaattaaggtatattttatatatagtaaaatttgtttttattgttatatagtttgtttttaaatgtatgtaattgtataattattattgtagttaggatttggaatagtttatttatttttaaaatttttttgtattttttgtagttaattttttttttatttttggtttttggtagttatttatcggttttttgtaagtgttgttttttttagatgttttatgagtggaattgtatagtaggaagttttttgagtttagttttttttatttaggagattgtatttgagttttatttaagttgtgtgtattaggagtgtgtttttttttattgttgagtggtgtttcgtggtgtggaaatgatgatttttttattagtataaatttatgttttaggagcgtttattttttgaaaataaaaattaaaataaaaatataatggaggtcgggtgcggtggtttatgtttgtaattttagtattttgggaggtcgaggtgggtggattatttgaggttaggagtttaagattagtttgattagtatggtgaaattttgtttttattaaaaatataaaaatagttaggtattttggcgggtatttgaaattttagttatttgggaggttaaggtatgagaattatttgaattcgggaggcggaggttgtagtgagttgagattgtattattgtattttagtttgggtgatatagagagattttgtcgtaaaaaaaaaaaaaaaagaaaaaaaaaattagttgggtgtggtggtatacgtttgttattttagttatttagaaggttgaggtaggagaatagtttgaatttaggaagcggaggttgtagtgagttgagattatgttattgtattttagtttaggtaatggagcgagattttattttaaaaaaagaaaaaaaaaggaaaaaaaagaaatgttagtatttatagataagatttaattttgttagtggttgtttgggattttttggtttggttatattttgatttatttaattattttttttttgatgggtgttatttttaaaggttttgttgttataaataatattgttgaatatttttacgtggatatcgttttatagttgataaattttttttaggatagaagtggtttggttgttttggaggagattttgagattattgttatattgttttttttaaacgttgtgtttttatggttttttggatgtttttaaattgtagcgagcgtttatttttagttagggtttgggggtgtatgttgtttaaggtagggttttgttttggggtaattgtaatttttgagttttatgatgagatggtttaagagttaggggttttagttttgggttgtagggaggagtttagggaaggttttttggaggagttgacgtttaggtagaaatttgtttgttgagtagtagtttgttaggtaggggagtaagtgggtagggttgtttaagttaggggaggatttggttagttgaggttttgaaagggttagggttatttacgtatcgttgagtaatggtgttttttaaatgtttagggtagtggttgaagggagtggtagtgggtggggatgataggaagttggggtaatcggtgaaggtttttattgttaagttaaggagtgggaatgttgtttagggtaagcgagagtttgattatatatttgaggaagtgagttataggttggaggggagaaaggattagtgttttgggatggaggttgggtgggaatttatatttggtaagagtttattaggagttaggttttgtgtaaggagaagttttttttttttttttttttttttttttttttttttttttttttttttttttttttttttttttttttattttttttttttttttttttttttttttttttatttttttttttttttttttttttttttttttttttttttttatttttttttttttttttttttttttttttaaattaatagatttttttttaaagagtaattttgggtttatagaaaaattgagttataagtatagggagtttttattgattttttcgtattttgttatatacggttttttttatggttaatttgttgtattggtgtgatatatttgttataattgataaattagtattgatatgtttttattcgttaaggtttttcgtttatattagattatatttttgatggtgtatattttgtgggttttgacgaatgtataatgatatgtttttattattatagtagtttatagagttttttatagtttaaaatattttttgtgtttttttatttatttttttttttttttaattttttgcgattattgatttttttattgtttttgtagttttgttttttttagagtgtcgaatagttgtaagtaaatatatagtatgtagtttttttagatcggttatttttatttagtaatgtggagttagggtttttttaggtttttttacggtttgatagtatattttttttttttgttgaataatattgtgttgtatggatgtattagtttatttatttttgaaggatattttggtttgttttgaatgtttagtaatgatgaataaagttgatataaatatttatacgtagttttttttatggataaagtttttaatttatttggggaaatatagtatttgtttttttgtggttggtttattttatttagtgtagtgtttttaatttttttttatgttgtggtatgtat

SEQ ID NO: 127 - DNA, 17491 bp, Artificial Sequence
  chemically treated genomic DNA (Homo sapiens)
tttttttgtggatataaagaaagaatttgaagttttttgttttaaaataatgtatgtagagatatataatttagaggagtattgattatgtatgtgttttttgtttttagttatggagtttaggttaaagatttatatatttataaataattatatttaaatatgttgtatttttttagagatttttagaatttggggaaggggaaattatttttttaattttaggaggttaagatagttttatagaagaatttttattaattttttaaacgagttgtttttagtttttgtttttgtttttttgttagtgtattttgtaaatgattattttaagattaggtattttttgatataatttttagttgatagtttaatattttttattaaaagtttaaatagttgtaaaggttgtaatttttggtatattgtaaatttatatacgtaaaagtaaaataattatattatttttttaaatgtatttagttaaattaaatgttttagtaattcgatatttataattatttatttaaaaaatatatgaataagtttttttttaagagttagatattttgtattatttttttttttatttgaagttaaatttttattttatgttttattataaaattttattataatgtgtttttttttaatgcgttagaggtttattgatgatttttttaaaaagttttgtaataatttaaatagttttattaaggtataattggtataaaataagttatatatatttaaagtatataattgatataaatatatgtttgttgtgttaggttgtttgcgttattataaatatatgagattgggtaatttataaagaaaagaggtttaattggtttatagttttgtaggttatataagtatggttttagtatttgtttttggcgaggggtttaggaaatttttaattatggcggaaggtaatggggtagtagatattttatatggtattattaggattaagagatagggaaggtggagtttttagatttttaaataattagatttagcgtgaattgagagtgagaatttatttattattaagtggataatgttaaattatttatgagggatttgttttaggatttagttatttttaggttttatttttaatattaggaattatattttaatatgagatttggaggggataaatatttaaattatattattttttaaattagttttataaattttgataaataattattaagtagaaaaagtaaagttgttttagaaatatttgttttaattaggtggttgtggtaatttttttttttaattagtttattaaaatttttatgagattgggtatagtcgtttatgtttgtaatattagtattttggaaggtcgaggtacgcgggttatttgaagttaggagtttgagataagtttggttaatgtggcgaaattttatttttattaaaaatattaaaattagttaggtatggtgatgtgtatttgtaattttagttatttgggaggttgaggtataagaattatttgaatttaggaggttaaggttgtagtgagtagaggttgtgttattgtattttagtttgggtgatggagtgagattttgttaaaaataaataaataaataaatattttaacgaatattgttagaatgaaataggttttagtaataattttatttttattttttattttttatagttgttaaattatggtgtggtaaagttattttgtagtggtttatgaaagttaatttttagaaattttgtggttgggtgttatgtaattttagtattttgggaagttaagttgagaggattgtttgagtttaggtttttaaatttagtttgggtaatatagtaagattgtgtttttattaaaataataataataataataataataataataataataataataataattagttgtgcgtggtggcgtatgtttagttttaattatttaggaggttgaggtgggaggatttcgtgagtttgggaggttgaggttgtaattagttataattttgttattgtattttagtttgggttatagagagagattttgttttttttttgttgtttttttttttatgttattagttagttgttaaatataattattattaaaaattaatttatatgaatatataattatattaaaaaaaaaggaggtcgggtatagttgtttatatttgtaattttagtattttgagaggttgaggcgggtagattacgaggttaggatatcgagattattttggttaatatggtgaaattttgtttttattgaaaatataaaaattagtcgggtatggtggtgtgtgtttgtagttttagttattttggaggttgaggagaatcgtttgaatttgggaggcggaggttgtagtgagtcgagattgcgttatcgtattttagtttgggtgataaattgagatttcgttttaaaaaaataaaaataaaaataaaattataaaggaaataaatatttaaaatttattatttattaattattttattatattttattgttatttatgtttttgagattatttgtatttattgtatttgtgtggtagaaatatatttttttagttttatgtttagtgatattttattggtagtttgaaattagttatgttggtagtatttatattatagaaattggtaaattagtattcgttattttttttagttaattgttaaatatttattggtatattattggttgtaagtgttgagaaatttataaaagttggtaggaatagaagaatttttgttataatagtgtgataatagataattaaaattatagttatttattttatatttaatgatttatttattgataattagattaggtttttttgtaattttgtggaaagtaaagattgtaaattatttaatttgtaaaaggattttttattttggtatgagatttttttatttttttagttttgttttaaattttagggaagtatgttaaaaattattgaaagttattgtttatttttaaatttgtggaaatttcgtggttagtatttgaagtttgttttattgttaaggttttttgttataagagatttttattttttgataataattaagaggtggaaaaagggaagttattattaattttttattttataaagtatatgaatttataatatgttaatagtggttaaaatgttttatttttaaggttatgttatatttttagaaagatttatatataagttagggagagatagggttaggttttttttgtatttcgattatcgtagaatgtttatttttatattttgtaataattttaatagtacgtgtgtttggggatttagagaattttatagtttttatatagtatttttttttatttttttttttaatttgtttttattaatgtattgttaggaggatgaagggtaaggaggatatataatttttttttataaagggtggaagtttattttaagaatggaaataaatttgtagattagtttttagagagattaaatttttgaaaaagtttaaaatttggtagatgaagtttttagaatagacgttagttattttgagattagcgttagagtggttttagagtggttgaggtttatcgtttatttttgtttagtttattgttaagaatggtttttgtatttttattttttatttttttgagacggagttttgttttgttgtttaggttggagtgtagtggggagattttagtttattgtaattttcgtttttcgggtttaaacgatttttttgttttagtttttagagtagttgggattataggcgtaggtaattatgtttggataatttttgtattttgtagagacggggttttagtatgttggttaggttggttttaaatttttgagtttaagtgattcgtcgttttagttttttaaagtgttgggattataggtatgatttattgtattcggtttgtatttttattataaaatgttatttatttatttatttatttatttatttatttatttatttatttttgagatagggttttattcggttatttaggttggagtgtagtgagcgattatggtttattgtaatttttatttttttggtttaagtagtttttttattttagtttttagagtagttgggttataggggtgtattataatgtttggttaatttttttaaaaattttttgtagagatgggggttttattatggttgtttaggttggtttttaatttttgggtttaagggatttttttatttttcggttttttaaagtgttgggattataggcgtgagttatagagtttagtcgatttttgtatgtttaaatggttgggaataaagttaaaagaataataatatttcgtgatatatgaaaattatattaaatttaaatgtcggtgtttataaataatgttttattaggatttagttgtttttatttttttagtatttatggttgtttttgagttacgacgttcgagtttgaatagttgttatagggatcgtatggttcgtaaaatttaaaatatttagttttttatagaatagtttgttgttttttgttttaatacggtttatattttatttgggaagttttgtgtttttagaggggagtatattcggtatgaaggttggtttaaatttaatattttagggaagtttttttcgtttttgggttttagtttttttaattataaaatggggttagtcgtagtgatttttggggatttgtttggtagtgggttaaataaataaagggagttggatttttcggagggtaggattaggggttgagtaggagtcggcgggttcgggtagggcgggttttttggggtttttaatttcgcgggcgggcgtagtgtttcgtaggtttcgtttttattggggaatttcgggcggggtgcgggcggcggggcgggggcgggtcggggcggggtcggtaggtcgtttataagatgggtggcgcgttcgttcggggttattcgtcgtagtttgcgcgttttttttagttcgcggtgttatggttttcgttcgtttgttcgcgttgttgttgtttttcgtaggcggagtcgtcgagtcggtgggtgtttggaggttttcgggttgggggcgaagcgggggcgtaggtcggtgttttttttgttcgtcggagcgtgggatgggggggggtagatcgggggtacgttatttttaatcggatatcgaggttcgggaaattttgttggaaattttgtttcggggttacgggttagttttcgggatggttttacgcgtcgtgcgtttttcgtttgttgtttttttcgttttttcgggttttagtttcgtcgcgggttacgggttcgttagtgattaagtcggtgttaattttttaatttttatattttcgttttttttttggtgattttggggtaggtttggagcgttgaatttttttttcgttttcggggcgtttagagtagatagttttaggattcgagatggttttgggggtcggggggttgcgtgtattcggaagggggagggttttagggttgtgcgaggtttttttttatatattaaggagaattgagttttaattttagttttggttttagttttgttattgatttgtgatttagggtaaagttttgtttttttgaatttttttttaatattgtattaagggtttgagggaatggggtaagaggggatattgcgttagggtttttagaaagttggggattttgtttttttcgaggatagaggagaggaatggtttagatttaatatttagttaggagttgagtttttgttttttgtaagaagtgtgtttatttttttttaattgtagataagaaaattgaagtatttattttgagtgaggtgaagggggtaggggggagagaaggttttaattagtttagggaaattttttttttttattgtttattggttttcgttatagttgtttttgggttagtagaagttttatttatgttcgtagtcggtttaggaggaggggggtaattttatttgggaagttggggggtatgggaattattggtgaaggtaatttgttttttatagtttgagttttgtgttttttttgtgttttttagttttagtttttagagcgagtgagtttttgtagtttaattattaatgttaatttttttgaaagttttggggtttttgtttttttgaatttatttagcggaaggttgattttgtttgtaggttttttttgaggaatgaatgagattttaggtaatatttttagtataattttaggtatgttatgatgattgtaaacgtggagcgtttttgtcggggggttagatattgttttaataattttttaatgggtatatttaggagtttaattttaataataattttattgtgtattgtttttaaattggttttgaggttagagaggttaagtaatttgtttagggttatatagttaatatataataaatgggtgagttagattgaaatttaggtagttaggtttttaagtttttgttttagtttaatttttattttttgtgttattttaggtgttttatcgttggtaattaaagacgggtttagaataggttgagattttaggttggaaggtaaaggaattttgaggtggaaggaaataaggttagagtgaggtgatgatttaatttaaattaaaggttattttgtttaaaatgttagtggttgaggatttaagttttttgtttttagtatagtgttttaaattaggttttgaaggatgtgtcgggttaagtaattggggaagtattcgaagggatattatttaggtagtatagggaaaaagaggaaaggatttaggaggttgttgaggttatcgtgtgtttagttatatgttagtttttttttaggggttgttgagtttttaggtgttttagggtgttgagtagttagttgtgttttgggggtattttgaaggatgtagtttgggggaaggggattgtgttagttttgtttgggtgatttattagttgtaggagatattagttttgggtagttgttttttgagataggtgttaagttttattttgattttagtttttttttttttggttaatgttatagattttttgtttgtaattggggtatagggttttttttttggtttgtttttttttttttttttagattgtggttggaaaaattagatatagttacggttggttcggattgaagagatgatttagcgtgtttttttttttttgtaggtagagaaaagtgaggtttagggagaaggattttgttaatagtagttaggagtgatagagtattttttatatgatagatttggtgtattttgtttttataaaaagatttgttatatggggattttattatgtttattttttaaatgtgagaggtaaaatggtattattttgggttagtagagggtatttaggattttaggatttttgattagtagtttttttattgtgggtggtgttttttcgattgttttattattttttttattatttttatattttggaagggaatttaggtttagtatttagttgtttttttttttgtttggttgggtttgttatattaaattagttttttttgtttagttgggagtattttttgatttgtttttttgttatttttttttaggttaattaaaggtagttttgttttgggagttttttttatttaaaggtgtttttatttaggggtatagtttattgatttggtttcgggtttaggcggttgtggggaagtgttttttatttattatttattaagtgtattttagtttaaggatatttttggttttttatagcgttttttttttgattatatgggagtaggggtgggggcggaagtttaggggtttttaggatttttgagtgaatagtgagagtttttgggattttttgagtttagggagttattaaatatttacgaaaatatttgggttatgatttggagggttttatgaggttggggggaggttttttttttcgttgggttgatattttttattttaaaatgaaaggtttgaatagggtagtttttagagttttttttattttttaatttgattaataatttaagtatttattatttaaaagaggttttttttttgaaggaattaatttgagggaattaatatattttattaaatgttgaattttttttttttttttttcgtatattgagggtaggaattttgttttatttgtttttgtgaaatatttgttttttagtttgtatttaggaaatgtttgtatgaatgaataaattcgtgtatgtaattttattttaaatggtttattattgttatttattgttagtatgagtattttttagtattgcgaggtattattttttttatttttataggaaattgatgttcggaataatgtagtggttttttaaggttagaattaggtttttttgatagggtaaggtgtttggtttgagtgtttttagaatattttagatgaggaaatttgttgggtttgaaggtagatattttaggttttatttttgcgttgttgggtgattttgagtaaatatgttttgtttttgggttttagtgtttttaattttaaaataaggaggttggattattgttttttaagggttttttttgtttagagagtttattgatgaggggaggggttttttgttggtttttttggtgaagagtttaaataaattttagttttagaagagaagttggggtggcggggggatatttagtttttgttatttttagtttttagaaatagagggtttttttaaggatttggagtgttgagtttgtttgaatgaggagttggggaagttaggttgggtttttagttttatttttttgttgggagaagttggtttttagttgttttttaatttttcggattggataggcgagtgtgatttttaaatgaatgtttaaaattggggtaaggggttggatcgagcgttgtgagttattgtatgttagcgtagtttgtttgagttatttatttttttttaaatttttggttaataggatagttttgtggtgggggtgttggaatgagtttagagttttattttgttttttgggagttattgttttagtgttcggggttcgaggggatatataggatatgtttgtattaggtttcgtatttttatagttttttgtttgtatgtagattttgatattgtatattgtgtagttagtttttaaaattgggttttagatttttgtagagtaggtagtattttttttttttttaaggtaaaattgaggttgtaattggtttgtatttttttagagagtaaaagttggtattgtttaggtttggtgtgattttaggattttttgatgtttgtgaggatttttttttgttttttggggttggttagagggtattgaaatattggtttggtgttatatagatttaattttagacgtgcgaagtttattttttattggttatatgaatttagttatgttattttatttttgagttttagttttttggtttgttaagaagattatgatatcggtgtggcgaagtttaaaggagacgatagggttgtaaataaaggtatttagtattatgtttggtagggaggaggtgttatttagtgatagtttttttttttgtttaggttatttttatgttagggggttttatttttgaagattttgagtttaggttttttggaaagttttttttattttttttattttttttatttatttttatagttgggaggtgggaagggagaaatttagggtggggtttttggagtttaaattttttatttgtttattttagaagtgggttgtttgttaattatcgaatgggtttatgtttaaataagaattagttttgggtagttttattttttttgttgggatttgttggagttttatgttgaatagtttgtagtttggagggagagggggtagggggtttgttaagggtattagattattttggatattgtttaggatttggggttatttttttgtgttggaggggtagagtttttatttttaaggaggttgagtgattgtaaatagtattttgaggggtggggtgttggtggatagaaaaggtatagtgttttgaaaagttagtttttcgtatgtttttattgtatggtgttttagagagggaggagagagaatatatatgttaatagttggggttttatttaattttagaagaataagtttgattttttgggtttgtttgttattaattaatatagtggtgattttgggtatatttttgtattttattggggtttttttggttttatttgttgaaggttgggtgattgaaaaagagggtatagaaaattttagttttcgttttagttttgttgtttatttagggatatatatagttaatacgttattttgttgatgtgaattttagtgttttttataaaatatttgtggtatttaaaggttattatcgttgtttggtaaatttgtaaagttttggttttattagtatttagacgagggtttttaattcggttagagtttggttttggggaggtggtgtttgtgtatatgttgaaaatgtaaattaagagttatagttattggggtttagatttttttattttttttagggggttgtagtattttttaaaaggttattttgattttagtagttttttttggttttgatttttttatagttatttttttttttttttttattttttagttttgtttttgttttttgttttttttaatttttatttttagtttagatttttttatttagcggtttttatttttttaggttgtattttatttttttttttgttttttaggttcgggagttcggttgttttagttttttttggtatagtagaagaggttgttggttaggtgatatttggggtaatggaaaggggaggtagggagaggttggtatgtgtggaaatagtgatttggtgaagtttagtagttagtggttaggtttgcggggattggcggtgttattttagtttttgggcgtgggggtagatgtggtatatggttggttcggttatttagagtggggatattttttgttttggagaagttttgtcggagtcgtttgtgggatagattgatttggtttggaggatggtttttttgggggtcggtgagggaggttgggaagaggtaggaagttagtatttagggttgatttaattagttgagataaggttgtagcgtgggttttttattttgttttgagaatataggaggtttgtttatatttcgagagtttttttagttttcggatttagtagggatttcggatttgttgtttagattataagttttaattttaatgtatttttgtttttgaggttttgagggagttagtttttttttggttgtttttatcggtaatcggagtaatgtttagtttggttattgggttgggatagagggaggtttgtttttttgagatttgttttttatagattggaaaattgaggtttagagaagggaattgtttacgattatttagggagttagtaataagggtgttgggttagtttttggtagggagatatttagaggtttttgaattttttttttatttttagttggtattttaggattttggagtttttgttgtgggaatgggttgttttgaggtttggtgaaaagttggttgtaggtagtgttaggtttggtttttttttgagtgattgtgtttagagtaattcgattttgaaggcgatatttgaatttttattttatttttatttttagatttggtttaattatttaggtattagagtattagattatggattggtgtgtagtttttttttattttttagatttttatttatttattttgtttttggggatttaggtttttaagtagaattttaggtgtttttggttattgttatttgtattttcggggaaaataaaaatggtttttatttttgtttgtttaggataggtggttaaagttgtgtgattttgggtaggtttttgattatttttgtattttttttttatagtttgaagggatttgattggttgttgaaaagtttttgggtttagaagtaaaatgataatttattatagattatatttttttatagtttgtaaagtattatttttttgtttttaggttagtttttttttagtaatagaattgtttttgtaagtttttttaggtttttgattttttgagtattgattttattggttaggaggaaggtaggtaggggttaattatagttattatttattgattacgtgttgggttttttgtatatataaatgtattttttttaatttttattattttgtaaggtgttattagttttagttataaaagaggaaattgaggattttagagatgaaataaatttttaagtttatatagttaggaagtggtagaatttatatttgtgaatttgttttgatgtataattattttgggtggtagagttatagttgtgggttttaggttttagttattttggggaatgtttggtttttaagaagtgggtggggtggggaagaatagttacgagtagtgtacgttgttgggggttttttgttagaaattattttggtgggtttaggtgttggagttttaggtatttattattttttttttttattaaatttggtttgtttagttattatttttttggttttgttttttgaaagaagggttaagtgtgttttcgattttattttttttggggaggagttaggtcgggagaggtttttattagtttatagttatttaagttttgattttgaatttttttttggtgttttagttaagtttttgtttttttgtttaagtgatattatttttatttttgtttatttttaggtagggatagggttgttttggagttttggtttagttagtgtgttgtggattggcgggttaggttggagagaagtgaagagtgggtggtagtgagaagtttagttgtggttgggacgtgtttttgaggaagatttggatttgaattttagttttagttttttagttgtatgacgttggataagtgatttagttgaattttagtttttttatttgtaaaatgggtagagtattttgtaaggttgttttgttatttaaatgaatttgtataaataaagtatttagtatggtgtttggtatgtagtggatattttttttagttatttatgttttttttggggtgatagaagttataggatttggggatagggttgggataggattttttcgtagttttatgtttatagttaaaagattagatggggagtataattgtaatgatagttgttgtttgtggatttgttgagatttttaggggtagttaatattttggaaggggagagaagataattttagtttgggagttaggatatttaggttttaagtttattttcgttgttagttgtttggatgattttggtaaaattttttgttttgtttgtttgttaggttataaaattagatattttttgttggtaggtgttagtttttgtagaataaaagagtatttttttttttttttttttttttaatagtttggggaagaatgtagtatttttaaatttttaggtattaattttagatttttattagttatagggttagtagagtttgtgggatttaggtttattgttttattttttattttttggagatagggtttttttttgttatttaggttggagtgtagtggtacgatcgtagtttattgtaatttcgattttttgggtttaagtgatttttttattttagtttttcgagtagttgggattataggcgtgtataattatatttggttaatttttgtagagatggggttttattatgttgtttaggttgattttaaatttttgggtttaagtgagttttttattttggttttttaaaatgttgggattaagttattgtgtttagttattattgttttatttagttggtaatttttgttgtgtgtttatgaaagggataaagatataaggagatttgagagtttagagagggtgtttgtgtatgtatatatacgaatatatatgtttgggtaaaggtggggtgagttgaggagaatagattatatttttagttaggagtagggcggggtttatttttggttagggttgggtttggttgttgggtggtttggttttttaaagttattttagatttaatgggttttatttgaaaagagggcggaggagaggaggatcgttggtgtttttttaatttttatataaaaaagagtgattgtttataattttacggggtttggtttcgttttgttggtttagttttaaatggtttttatttattttggagttgtttttttttttgttagaggttatgggtggagaagggattaaaatagggtagagagggggtttttagagtttaaggagagatttaattttttgtgtttttttattattattgggagttggaagaagtttttttttagttttttgatttgttgtaggagggaaattttgggtttatttaaatgtagtttttgaagattttatttttttagagttttgaaataggatcgaatttaggtcgtgtcgcggagtttcggggtgattttagattagattagttttttttttggaaattgagtataaaaatgaagggttaaggatgaataggtgtttataaagagggttgaattgggaataaattttggttttagttttggttttgttgttgatttggttgtaagatttttacgttttattttcgtttatagtttttatttttttaatgtaaaacggaggtaatttttaatagttagtgggtatgttaattttatgggttgttttgaaatattttttagtatttttatatattgaaagagaggttggatgtataaataattttttatggtttttgggggtagtgaggggtgggaaaaggttttttagtttgagataagttttttgatggaattatagtttttgttgaggattttgatttggttaatagttggttaaagtgtattattttttttttttttcggttagattgatttttttatttaatagggtttttttggagtttggggtaggttggtgatttcgtgtatatatgtgtttatgcgtgtgtttatgtgtttgtggttaaatgtttaggttagtgaagtttgggttttggtttagtgtggttattttttgtttgtgtggttttggataagtgattttatttttttgagtttttgtttttatttttgtaaaaagggattattaaaaggatttagataggttgtgtgtttggttaaggtttgttatttgggtttttgggggatttgttataggagatggaggtaggagtatagggattttgtttttaggtataggtatttgggtagttatgaggagttttttttttgttttgttaaattaaagttataggtacgggttatgtgcgggggtttgaattttagtattagtagttcggtagtttttgattttcgagttatgaagttatttttgagtagtatttaatttttttggttttttatttttacgggtgttaagcgtttagtattttttttatttttcgggagagagtgatttttggttattgttttttttgtggtttgatttcgttttttttcgggaatttagtattttttttttgtgggggtggaagagggtgtatgagggttaggttttatttgtttttttttagaagtttagtggggagagtataggagtggttttgaagtagtttttttgggttttttttgtaatgataataattttattttagggatagatgtttttttttagatatttttttttgttaatggtagttttagttgagtgaaggattgtttggggtgttcgaaatagagatttgatttttttttattttgagttatgtagcgaacgttttgtgtgattttgggtaagtttttgttttgtttcgggtttagatttaagttgtgtgaaacgggaggataggagttttttgggttttggtattttgtgattttaagtagatttttagtttttgtagttatggcgtttggagaagatgggaatgttttttagcgggaggggtatggtgtattgaatttaatgaaaaattttaatttttttggtaaatattaggtattttagtgtttgaattaattagtagaataatgaattttgtttagagttgttgttttttgggtaaatagaagtttgagtttagaagttggaggaagggtgatgggtatttaaatgttttttgtgtttttgagggtatattgtttttattcggtggagttataggatgggagtagggtaattgatgtattgtagggttgttcgggatttttgatatttttttttggtaagcggtttggtgggagtggatttgagattttgttttgattagttgtgtttttatagggtagtggttgagtgatgattatgggtattggagtggatggtttgtgagggtagggattgtgtttttcggtgtttgtatggtgttggtagtagagtagatttgtgggagatgtttggaaggtaagattgaatttaggagtatatttttgagttattaggtttgggtagcgttttgatttgaggttgttttagggtgtgcgtgaggtagttttgtttgtttcggtttagattgatttagttgggaaaagtattttggattgggtaagattagaattaggagtttattttttgttttgtgtgaattagttgttattgtattatagagttttggagtgtagtattttagggttttgtgtatggagatttttggttttgaagttaggtagttttgcgtatgtaattttcgtttttttatttgttagttgtgttattaaaagaaaatgattttttcggttgtaaaaagaagtgaataatatgtttttagagttattaaaatagggtttagtatatagtaagtgttcggtaaaggatatttagttatattaataatttgattattattttatttattgtttttattttttttgagacgggggttttattttgtagtttaggttagagtgtaacggcgtgattttggtttattgtaattttcgtttttcgggtttaagtaatttttttgttttagtttttcgagtagttgggattataggcgtaagttattacgtttagttgatttttgtatttttagtagagacggggttttattatgttggttaggttggttttgaatttttgattttaagtgatttgtttgttttcgttttttaaagtgttgggattataggtgtgagttattgtgtttagttttatgtattatttttatttgtttagaatggaaagagatttgtttaaggatacgcggtgagttagaggtagagtgggatttaggacgtaggtttttaggttttggtttggtttttttttagtttttgaatgtttattttattagtttttgggtattagttgttatggagtattggggatgttggttgatgtgttttttttttttattttaga

SEQ ID NO: 128 - DNA, 17491 bp, Artificial Sequence
  chemically treated genomic DNA (Homo sapiens)
tttaagataaagaaaggagatatattagttaatatttttagtgttttatgatagttgatgtttaaaagttagtgaagtgggtatttagaaattagaaagagattaggttagggtttggagatttgcgttttggattttattttatttttaatttatcgcgtgtttttaggtaagtttttttttattttgggtaaataaaaatagtatatgaggttgggtatagtggtttatatttgtaattttaatattttgggaggcggaggtaggtagattatttgaggttaggagtttaagattagtttggttaatatggtgaaatttcgtttttattaaaaatataaaaattagttgggcgtggtggtttacgtttgtagttttagttattcgggaggttgagataggagaattgtttgaattcgggaggcggaggttgtaataagttaggattacgtcgttgtattttagtttgagttatagagtgggattttcgttttaaaaaaaataaaaatagtaaatgaggtaataattaaattattaatatggttagatattttttatcgagtatttgttatgtgttgggttttgttttaataattttggaggtatgttatttatttttttttatagtcgagggagttatttttttttggtgatatagttggtagatggaagagcgaggattgtatacgtagggttgtttgattttagagttaggagtttttatgtatagggttttgggatgttatattttagggttttgtgatgtagtggtagttgatttatataggatagggagtgggtttttggttttggttttgtttagtttaggatattttttttagttgagttagtttgggtcgggatagatagggttgttttacgtatattttaagatagttttaggttagggcgttgtttagatttgatgatttaggagtgtatttttggatttagttttgttttttaaatattttttatagatttattttgttgttagtattatgtagatatcgagaggtataatttttatttttatagattatttattttagtatttataattattatttagttattattttgtggagatatagttgattaggatagagttttaggtttatttttattaaatcgtttgttaaaagaaagtgttaaaggtttcgggtagttttatagtatattagttattttgtttttattttgtagttttatcgagtgggaataatgtatttttaagagtataggaaatatttggatgtttattattttttttttagtttttgggtttaggtttttgtttgtttagagaatagtagttttgagtaaagtttattattttattaattaatttaaatattaaagtgtttagtatttgttaggagagttggggttttttattaagtttaatatattatgtttttttcgttgaaagatatttttattttttttagacgttataattgtaggagttgggggtttgtttagaattatagaatgttaggatttaaggagtttttgttttttcgttttatataatttgaatttgagttcggaatagggtagggatttgtttaaggttatatagagcgttcgttatataatttaggatagaaagaggttaggtttttgtttcggatattttaggtagttttttatttagttgagattgttattgataaaggagggtgtttgagaaggaatatttgtttttaagataaggttattattattgtaggagaggtttaggaaagttgttttagagttatttttgtattttttttattgggtttttggggagaggtaggtggaatttgatttttatgtatttttttttatttttatagagggagaatgttggattttcggaagggagcggggttaggttataaggaaggtagtggttaggaattattttttttcggggagtggggagaatgttgaacgtttggtattcgtgggggtggaaagttagagaggttaagtgttgtttagagatgattttatgattcgggaattaggagttgtcgggttgttggtgttggaatttaagttttcgtatatagttcgtgtttgtggttttggtttggtagagtaggaggaaggttttttatggttgtttaagtgtttatatttaagggtagggtttttgtgtttttatttttattttttgtggtaaattttttaagaatttaagtgataggttttaattaagtatatagtttgtttaggtttttttaatagtttttttttgtagagatggaaataagggtttagaaaagtaaagttatttgtttaaggttatataagtaggaagtagttatattgggttagaatttaggttttattgatttggatatttaattataaatatataaatatacgtatgaatatatatgtatacggggttattagtttgttttaggttttaagggagttttgttaagtaggggggttaatttagtcgggagaaagaaagaatggtatattttggttagttgttgattaggttaaagtttttaataggggttgtagttttattaggagatttgttttaggttgagagatttttttttattttttattgtttttaggagttatggaaggttgtttatgtatttagttttttttttagtatgtgaaagtgttaagaggtattttaaaataatttatgggattagtatgtttattggttgttaggaattattttcgttttatattagagaaatgaaggttatgagcgaaagtggggcgtgaagattttgtagttaagttagtagtaaaattaaggttgaaattaagatttatttttagtttagttttttttgtgggtatttgtttatttttaattttttatttttatatttagtttttaaaaaagaaattagtttagtttgaagttatttcggggtttcgcggtacggtttggattcgattttattttaaagttttgaaaagatggagtttttaaaggttgtatttagatgagtttaggattttttttttatagtaagttaaggggttgggaagaaattttttttagtttttagtggtgataggaggatatagggaattaaatttttttttgagttttggaagttttttttttgttttgttttggttttttttttatttatgatttttgataagagggaaggtaattttaaagtggataagagttatttaggattaggttagtaagacgggattaagtttcgtgggattgtgggtaattatttttttttgtgtaaaggttgggaaggtattaacggtttttttttttttcgttttttttttagataaagtttattgagtttggggtgattttgaagaattaggttatttagtagttaggtttagttttgattagagatggatttcgttttgtttttggttaagaatgtggtttgttttttttagtttattttatttttgtttaggtatgtgtgttcgtgtgtatatatgtataggtattttttttgggtttttaagtttttttgtatttttgttttttttatgaatatataatagaaattattaattaagtaagatagtggtggttaggtatagtggtttaattttaatattttgggaggttaaggtgggaggtttatttgagtttaagagtttgagattagtttgggtaatatggtgaaattttatttttataaaaattagttaaatgtggttgtgtacgtttgtggttttagttattcgggaggttgaagtgggaggattatttgagtttaggaggtcgaggttgtagtgagttacgatcgtgttattgtattttagtttgggtgatagaggaagattttgtttttaaaaaataaaaaatagggtaatgggtttaggttttatagattttgttggttttgtggttggtggggatttgggattagtgtttgggggtttagagatattatatttttttttagattgttggggagaaagaagggaggggaagtgtttttttgttttatagaaattaatatttgttaatagaaggtatttgattttataatttagtaaatagataagataagggattttgttaaggttatttaagtagttggtagcggagatggatttagaatttaggtattttggtttttagattggaattattttttttttttttttagggtgttggttgtttttaagggttttagtaaatttataggtagtagttgttattatagttatattttttatttagttttttggttataggtatgaagttacgaaaaggttttattttaattttatttttaaattttatggtttttattattttaggaaaagtatgagtgattaaaaggagtatttattatatgttaagtattatgttgggtattttgtttatataagtttatttaaatggtaaaatagttttgtaaggtgttttatttattttgtagatgagaagattgaggtttagttgagttatttatttaacgttatgtaattagaaagttagagttgggatttaaatttagattttttttaagaatacgttttaattataattaggttttttattgttatttattttttatttttttttagtttaattcgttagtttataatatattggttgggttagggttttagggtaattttgtttttgtttaggagtaaataaaggtgaaagtgatattatttaaataaaggaatagaaatttggttggggtattagagaggagtttagggttagggtttggataattgtgaattaatgagagtttttttcgatttggtttttttttaggggaggtagggtcggggatatatttgattttttttttaggaggtaagattagaagggtaataattgggtaagttaaatttagtggggagaggggatggtgagtatttggggttttaatatttggatttattagaatgatttttagtaggagatttttagtagcgtatattattcgtaattgtttttttttattttatttattttttaagggttagatattttttagaatggttaaaatttggggtttataattgtgattttattatttagagtggttgtgtattaaggtagatttataagtgtgagttttgttattttttaattatatgagtttgggagtttattttatttttgaaatttttagtttttttttttgtgattagggttggtagtattttgtagggtgatgaggattaagaggaatgtatttgtgtgtgtaagggatttagtacgtgattaatgaatagtggttgtgattaatttttatttgttttttttttggttagtgggattagtgtttaaaggattagaggtttgggaaaatttgtagaggtagttttgttgttggaaggaagttagtttggggatagggagatggtgttttgtaaattgtaaaggaatataatttataataggttattattttgtttttgagtttagagattttttaataattaattaggtttttttagattgtgaaaaaaagatatagagatagttagagatttgtttaaggttatatagttttgattatttgttttaagtagatagaggtaaagattatttttatttttttcgaaggtgtaaatgatagtgattagaaatatttgaaattttatttggggatttgggtttttagggataaaataaataaataaaaatttagaaggtaaaaagaaattatatattaatttatggtttggtgttttggtgtttgaatggttaaattaggtttgggggtgggggtggagtgagggtttaaatgtcgtttttaaggtcgggttattttgaatataattatttaggagagagttaggtttggtattgtttgtaattagttttttattaagttttagggtagtttatttttatagtaagaattttaggattttagggtgttagttagaaatgggggaagggtttaggagtttttggatgtttttttgttaggagttgatttagtatttttgttattaattttttggatgatcgtggataatttttttttttgagttttagttttttaatttgtaaaagataggttttaaagagataagtttttttttgttttagtttagtaattaagttgggtattgtttcgattatcggtggagatagttaggagggggttggtttttttagggttttagagatagaggtgtattgaagttggagtttgtaatttaggtagtagattcgaaatttttgttggattcgagggttagggaggttttcgggatgtaaataaattttttgtgtttttagagtagagtagagagtttacgttgtagttttattttagttgattagattagttttgggtgttggttttttgtttttttttagttttttttatcgatttttaaggaagttattttttagattaggttagtttgttttatagacggtttcggtagggtttttttaaggtaaggagtatttttattttgggtagtcgggttagttatgtgttatatttgtttttacgtttagaggttagagtgatatcgttagttttcgtaggtttggttattgattgttgggttttattaagttattgtttttatatatattagtttttttttgttttttttttttattattttaggtgttatttgattagtagttttttttattgtgttagagaaaattggagtagtcgagttttcgggtttggaggatagggggaggggtgagatgtagtttgaaggggtgggggtcgttgaataggaaggtttgggttgaaggtgggggttgggggaagtaggaggtaagaataaggttgggaagtgggggagggaggaaggatggttgtagaaaggttaaagttagaaagaattgttgagattagagtgattttttggggagtattgtagttttttgaaaaggataaaaaggtttaaattttaataattgtaatttttagtttatatttttaatatatgtatagatattatttttttaaagttaaattttggtcgggttaagaattttcgtttaggtgttaataaagttagaattttataagtttgttaaatagcgatgatgatttttgagtgttataggtgttttatagaggatattggagtttatattaataaagtgacgtattaattgtgtgtgtttttgggtgagtagtagagttaggacgggggttggagttttttgtatttttttttttagttatttagtttttagtagatgggattagagaggttttagtgagatgtaagaatgtgtttaaggttattattgtgttagttaatgataaataagtttaagaagttaggtttatttttttaaggttaaatgagattttaattgttgatatatgtgtttttttttttttttttttagggtattatgtagtgaaaatatacgagaaattggttttttagaatattgtattttttttgtttattaatattttattttttaaagtgttatttgtaattatttagtttttttaagggtagaaattttgtttttttagtataggagggtgattttaggttttggatagtgtttagagtggtttgatatttttggtaaattttttgttttttttttttttaggttgtaaattgtttagtatgaggttttagtaaattttagtaggagaggtggggttgtttagaattggtttttgtttaaatataaatttattcgataattagtaaatagtttatttttaagataaataaataggagatttggattttaaaagttttattttagatttttttttttttattttttagttgtgggggtagataagggggataagggggatggagaaagttttttaggagatttgggtttagaatttttagagataggattttttggtatgaaggtggtttgggtaaggaagggaattgttattaagtaatattttttttttattaggtatggtattaggtgtttttatttatagttttgtcgttttttttaagtttcgttatatcggtattatgatttttttaatagattaggaggttggggtttagaggtggagtagtatgattgaatttatgtagttagtaagaggtggatttcgtacgtttggagttaagtttgtgtaatattaagttaatgttttaatgttttttggttagttttaggaagtaaagaggagtttttataaatattagaaaattttggggttatattaaatttgaatagtattagtttttgttttttgaaaaaatgtaggttagttgtagttttagttttgttttaaagaggaaaaaagtattatttgttttgtagaggtttaaagtttaattttgaggattggttgtataatgtataatgttaaagtttatatgtaggtaaggggttgtgaaagtgcgggatttagtataaatatgttttgtatgttttttcgagtttcggatattgaaatagtgatttttaaaggataaggtaaaattttgagtttattttaatatttttattatagagttgttttattagttaagagtttgaaaggaaatgggtgatttaggtaggttacgttagtatgtagtgatttatagcgttcggtttagttttttattttaattttaagtatttatttggaaattatattcgtttgtttagttcgggaggttgaaggatagttaggagttaattttttttaatagggagatggggttgggagtttagtttggtttttttagttttttatttaggtaggtttagtattttaagtttttggaaaagttttttgtttttaggagttggggatggtaggagttgaatgttttttcgttattttaattttttttttgagattgggatttgtttagattttttattaaggaggttagtaaagggtttttttttttattaatgggttttttgggtaggaaggatttttggaaggtaatggtttagtttttttattttagagttggggatattgagatttagagatagggtatgtttgtttaaggttatttagtaacgtagaagtaggatttaaggtatttatttttaaatttagtaaatttttttatttggaatattttgaggatatttaaattagatattttgttttattagaaggatttggttttgattttaggaagttattgtattgtttcgagtattaattttttgtaaaaatagagaaaatggtatttcgtagtattgggagatatttatattagtaataaataatagtaatgaattatttagaataaagttatatgtacgaatttatttatttatataagtattttttgagtataaattaggggataggtattttataaaaataaatagagtagagtttttgtttttagtgtgcggggggagagagggagggatttagtatttggtggagtatgttaatttttttaagttaatttttttaagagagagattttttttgaatagtaggtatttaagttattaattaaattgagagatggaaaggattttggaggttattttgtttaaattttttattttaaggtgggggatgttagtttagcggggaaagaggtttttttttaattttatggaattttttaaattatggtttaaatattttcgtgggtgtttgataattttttgggtttaagaagttttaagagtttttattgtttatttaagggttttagaagtttttaggttttcgtttttatttttatttttatgtaattaagaagaggacgttgtagaagattagaaatgtttttaagttaaagtatatttgataggtgataggtgggggatatttttttataatcgtttgggttcggggttaagttagtaggttgtgtttttgggtaggaatatttttgggtggaggggatttttaaaataaggttgtttttaattggtttgagagggagtggtaggaaggtagattagggaatgtttttagttggataggaagaattggtttagtatagtaagtttagttaaatagaggagaggatagttgggtattgagtttgggtttttttttaaaatatgggggtggtaaggggaatgatggaatagtcgggggaatattatttataatgggagggttattagttagagattttggggttttggatgttttttattaatttaaagtagtattattttattttttatatttgggaagtgggtataatagaatttttatgtgataggtttttttgtgaggataaaatgtattagatttgttatataaaaagtattttattatttttaattgttattagtaaagtttttttttttgggttttatttttttttatttgtaaaaagaaaaggatacgttggattatttttttagttcgagttaatcgtgattatgtttgatttttttaattataatttagaaaagagggaggggataggttaaaggggaagttttgtgttttagttataggtaggaggtttgtgatattagttaggaaggggagagttgaggttaggatgagatttgatatttattttaggaagtagttgtttagggttgatgttttttgtagttgatgggttatttaggtaggattgatatagttttttttttttaaattatattttttagaatgtttttaggatatagttgattgtttagtattttgaagtatttgaaggtttagtagtttttgggaggaaattggtatgtgattgggtatacggtgattttagtaattttttgggtttttttttttttttttttgtattgtttaggtggtattttttcggatgtttttttagttgtttgattcgatatattttttagggtttagtttagagtattgtgttagaggtagaaggtttgggtttttagttattaatattttaggtaaggtagtttttggtttaggttaagttattattttattttggttttgtttttttttattttagaatttttttgttttttagtttaaaattttaatttattttaaattcgtttttagttattaacgatgggatatttggagtagtataaagagtagaagttaagttaaagtagaaatttgaaagtttggttgtttaaattttaatttgatttatttatttattgtgtattaattgtgtgattttgggtaagttatttaatttttttagttttaggattagtttaagaatagtatatagtaagattgttgttggaattaagtttttggatatatttattagaaagttattagagtaatgtttggtttttcgataaaggcgttttacgtttgtaattattatggtatgtttggaattgtgttggaagtattgtttagggttttatttattttttaagaagagtttgtaggtagaattaatttttcgttaagtaaatttagaggaataggagttttaaggtttttaaagaaattaatattaatggttaaattgtaaggatttattcgttttgaaaattggggttaaagggtataaagggggtataaagtttaggttgtgggggatagattgtttttattagtaatttttatgttttttaattttttagatgagattgtttttttttttttaagtcggttgcgggtatggatagagtttttgttggtttagggatagttatgacggaggttagtggatagtgagaaggaaaggtttttttgggttgattgaggtttttttttttttttattttttttattttatttaaggtggatgttttaatttttttatttgtaattgagaaaaaatgaatatattttttgtagaaagtagaggtttagtttttggttaagtgttgagtttaaattattttttttttttgttttcgaaaagagtagagtttttaattttttagaaattttaacgtagtgtttttttttgttttatttttttagatttttggtgtagtattgggaagagatttagaagggtaggattttgttttaagttataagttaatgatagagttggggttagaattgaggttagggtttagttttttttggtgtgtgaaagagggtttcgtataattttaaaattttttttttttcgagtatacgtagtttttcgatttttagggttatttcggattttaaagttgtttgttttgggcgtttcgagagcgaggaggggatttagcgttttaagtttgttttagggttattagggaagggacgagggtgtgggagttgaagagttgatatcggtttagttattaacgagttcgtagttcgcggcggggttgaggttcggggaggcgggaagagtaataggcgaggggcgtacggcgcgtgaagttatttcggaggttggttcgtgatttcggagtaaagtttttaataaagtttttcgggtttcggtgttcggttgggggtagcgtattttcgatttgtttttttttattttacgtttcgacgaataaaggaggtatcggtttgcgttttcgtttcgtttttagttcgggaatttttaagtatttatcgattcggcgatttcgtttacgaagaatagtagtagcgcgaatagacgggcgggggttatggtatcgcggattggagaaggcgcgtaggttgcggcgagtggtttcgggcgggcgcgttatttattttataggcggtttatcggtttcgtttcggttcgttttcgtttcgtcgttcgtatttcgttcggaattttttagtggaagcgaggtttgcggggtattgcgttcgttcgcggagttggaaattttaagggattcgttttgttcgagttcgtcggtttttatttaatttttagttttatttttcgggaggtttaattttttttatttatttgatttattgttaggtaggtttttagagattattgcggttaattttattttatagttggggaaattaaggtttagggacgggaaggatttttttagggtgttgagtttagattagtttttatatcgggtgtgtttttttttgaagatatagaattttttaaatgggatgtgaatcgtgttaagataggggatagtaaattattttgtaaagggttaaatattttaggttttgcgggttatacgatttttgtggtaattatttaaattcgagcgtcgtagtttaaaagtagttataaatattaaaggaatgagggtagttaggttttaataaaatattatttatagatatcgatatttgaatttaatataatttttatgtgttacgaaatattattatttttttgattttatttttaattatttaaatatgtaaaaatcggttgggttttatggtttacgtttgtaattttagtattttgggaggtcgaggaataggaggattttttgagtttaggaattggagattagtttgggtaattataatgagatttttatttttataaaaagtttttaaagaaattaattaggtattgtggtgtatttttgtggtttagttattttggaggttgaggtgggaggattgtttgagttagagaggtgaaagttgtagtgagttatgatcgtttattgtattttagtttgggtgatcgagtgagattttgttttaaaaataaataaataaataaataaataaataaataaataaataaatgatattttataataaaaatgtaggtcggatgtagtgagttatgtttgtaattttagtattttgggaggttgaggcggcggattatttgagtttaggagtttgagattagtttggttaatatgttgaaatttcgtttttataaaatataaaaattatttaggtatggttgtttgcgtttgtaattttaattgttttggaggttgaggtaggagaatcgtttgaattcgaggggcggaggttgtagtgaattgagatttttttattgtattttagtttgggtaatagagtaaaatttcgttttaaaaaaataaaaaataaaaatgtaaaaattatttttagtagtgggttgaataaaaataggcggtgggttttagttattttgagattattttgacgttggttttagagtggttgacgtttgttttaagggttttatttattagattttgaatttttttaaaagtttgatttttttgagaattggtttgtaagtttatttttatttttagggtaagtttttattttttataagagaaagttgtgtgttttttttattttttatttttttaatagtgtattggtgggagtaggttgagggaagaagtggaggggggtgttatatggagattgtaaaattttttgggtttttaagtatacgtattgttggaattattgtagggtgtgaaggtgggtattttacgatgatcgaagtataaaagaagtttaattttgtttttttttgatttatgtataaatttttttaagggtgtaatatagttttagaagtaggatattttggttattgttggtatattatgaatttatatattttgtggagtggagaattggtagtgatttttttttttttattttttaattattattaaagaataaaagttttttgtggtagagaattttggtagtaaagtaaattttaaatgttgattacggggtttttatagatttaaaggtaagtaatgatttttagtggtttttaatatgtttttttaggatttggaataaaattgagaaaatgaagaaattttatgttagaataagaaatttttttgtaagttaaatggtttgtaatttttgttttttataaaattgtaggggggtttaatttagttgttagtagatagattattaaatatagaataggtaattgtgattttagttatttattgttatattgttgtaataagagtttttttgtttttattaatttttataagttttttagtatttatagttagtggtgtgttagtaaatgtttgataattggttaggggaagtggcgagtgttaatttgttaatttttgtagtgtaaatattattagtatggttgattttaagttattaatgagatgttattgaatatggagttgggaagatatatttttattatatagatataataggtgtaaataattttaaaagtatggataatagtaaagtgtagtgagataattagtaagtgatgagttttgagtatttattttttttatggttttgtttttgtttttgtttttttgagacggagttttaatttgttatttaggttggagtgcggtgacgtaatttcggtttattgtaattttcgttttttaagtttaagcgattttttttagtttttagagtagttgggattataggtatatattattatgttcggttaatttttgtatttttagtagagatagggttttattatgttggttaggatggtttcgatattttgatttcgtgatttattcgttttagttttttaaagtgttgggattataggtgtgagtaattgtattcggttttttttttttttaatataattgtatgtttatataaattaatttttagtaatagttatgtttaataattggttaatgatataaaaaaaaaagtaataaaaaaaaaataggatttttttttgtagtttaggttggagtgtagtggtaaaattatggttgattgtagttttaattttttaggtttacgagatttttttattttagttttttgagtagttgggattagatatacgttattacgtatagttaattattattattattgttattgttattattattattattattattattttggtagagatatagttttattatgttgtttaggttgggtttgaaggtttgggtttaagtagtttttttaatttagttttttaaagtgttgggattatatggtatttagttataaaatttttaaaaattgatttttatgaattattataagatggttttattatattatggtttgatagttataaaaaatgaaaaataggaataaaattattgttaaaatttgttttattttagtaatattcgttgaggtgtttgtttgtttgtttgtttttgataaagttttattttattatttaggttggagtgtagtggtataatttttgtttattgtaattttagttttttgagtttaagtgatttttgtgttttagttttttaagtagttggaattataggtgtatattattatgtttagttaattttagtatttttagtagagatggggtttcgttatattggttaggtttgttttaaatttttgattttaagtgattcgcgtgtttcggttttttaaagtgttggtattataggtatgagcgattatatttaattttatggaggttttagtgagttaattggagagaaaaattgttatagttatttaattaagataggtatttttaaaataattttattttttttatttaataattatttattaaagtttgtaggattggtttagagagtgatgtgatttggatgtttgttttttttaaattttatgttgaaatgtgatttttaatgttggaggtggggtttggaggtgattggattttggggtagattttttatgaatagtttagtattatttatttggtgataaatgaatttttatttttagtttacgttggatttggttgtttaagagtttgggaattttattttttttgttttttggttttgatgatgttatgtgagatgtttgttattttattatttttcgttatgattggaagttttttgagtttttcgttagaagtaaatgttggagttatgtttgtatagtttgtagaattgtaagttaattaaattttttttttttataaattatttaattttatatatttatagtaacgtaaatagtttaatatagtaagtatatatttatgttaattgtatattttaaatatgtatagtttattttatgttagttgtattttaatgaagttgtttaaattattgtaggattttttaaaagagttattagtaagtttttgacgtattaaaaaaaaatatattatgataaaattttgtggtggaatatggagtagaaatttgattttaaatagaaaaagaaatgatgtaaaatgtttgatttttagaaaagagtttgtttatgtattttttaaatggatgattgtaggtatcgaattgttagggtatttaatttaattggatatatttaaaagagtgatgtaattgttttatttttacgtgtataaatttataatatgttagaaattataatttttgtaattatttaaatttttgatgaaaaatgttaagttattaattaaaaattatgttaaggagtatttagttttaaaataattatttatagagtatattagtaaaaaaataaaaataaaaattgaaaatagttcgtttagagagttaatggaagtttttttataaaattattttaattttttggaattaaggaaataatttttttttttttaagttttgagaatttttaaagggatgtaatatgtttgaatataattatttgtggatgtatgggtttttaatttgggttttatgattgggggtagaggatatatgtatggttagtatttttttaggttatgtgtttttgtatatattattttggggtaagaaattttagattttttttttatatttataaaaaga

SEQ ID NO: 129 - DNA, 5379 bp, Artificial Sequence
  chemically treated genomic DNA (Homo sapiens)
tagagtgttttaggaaggtaggaggatattattgtttttgtttttcggttatatttattaaatataattttatttttcgatagatgtttttgttacgtgtggttgtggttagtgttgttttttattaaatttaataattttttgtttatagggtggttttggttaaaattttaatatttgttttggggtttttaattttttttttttggttatttttttgttttttattttttttgttataaaagtgagaatgagtgggtttgggtatatagtaaaattggttaaagtttttgatgtttgattaaagggtgtggaggagaggataagagatttttaggaagagataataaagttaggaagggtgatattttagagattaaatagtattggtggtagatatcggggtgtgtttgagtttgtatcgtttttttttttttttttatttttatttatgtagcggatgttttttttatgcgagaaattgttaagagggtttatgtgaggcgaggtttgaaaatcggtaattcggtaatagttagttatatttttagagtttgggagatttagtggagttttgaagtatttttaattagtttgttttttgggggtatattttggattatttgaagagggagatgatatttataatatttaatatgtttaattatttaaattttatttaattttttttttaattttttttgatttgtttttatttttaaaaaataagtaattgttttttatgaaattttgataggaaaaagtaggtgaagaagttatagtttggttgtaattttatttttacgtagcgttggtttagggtttttttacgagaggaaagttgggtttgtttatggtttttttagtagtttaggtagttagaggggagtttattagtttttagtatttatgtatttgatttgtagtgataatttcgggggtagggatatagaaaatattgtgggagaatgtaggtaattgtaaggatgaatggattttgaataatatatttttggttaaaataagtatatatattatatatatataaattatatatatatatgtatatattgtaaattaaaaagtaattgaagtatattttaatagattagaggtttattttgttttaggtaaaagaaatataaattattgtaggatttgtgatttgcgttttttttaaagagagttttgggaatttttatttttagaggggaaagagtaagtaggaggggaagaaaataaacgaaagatgggttggtaatgagataagtgtttatattgtggtaaggttttgtaatatttagtgagtttatattttatatgtaaaaagaagggattagagggaaattatgtatggattttatgtttagtatatttatattttatataagataaagtaagtatgtgaaattataggtatttgggaataaaaggaaggtagtttttgtatgatttattttttaagtttaattttttttttggtatagtgaatttgaggttttaagattttattttttttttatagtattttatatatatttatatataatatatataaaaatatttatatttatatataaaatataaaaatatttatatttatatataaaatataaaaatatttatatatataaaatatataaatatatataaataatatatatattttatatatataatatattgtaattatatatatatattttatatatattatatattatatatagtttatatttaagttattgttatttatttattttttttattttttattttttttatttttcgaatattgggatttttttttgaagtttttttaatttagaaataattagtttagaatttagaataattagtttgttttttgattttagagaaaatttgtttttgaattaggaatttttgggaattgtggtttagggattaattttatttaggtatggttttatttgttttgtttgtttttttttttgtttattttttttttgtttatgtatcggggatttagggtttgtttttattgtattttttttttattgtttattgtttttggggttttttttagtttttatgttttagaatttaggatatagttattttagtggagagttgtgatggttaaggatgttttaggaagaagagggtaagaagagtataggaaatttgggtagaataaggaatttcggggtataataataaaagaaattatggtttggagtagtaggtaagggagtgggttttggatattaattgtttggttttaatttttagttttgtgtttttgaatgagataaaatttttagatttttaatttttttatttgtaaaatggggataataggagtatttattttataggttgttgtacggattgaataattaataggtgaatatataaaatgtttagaatatggtttggtatatagtaagtatttaataaatgttagagattataattgggggtttaggatatatatatgtaagtaaaatagaaattttattattattggggttatttttagatatttttgaattaattttaaaaaggggaagagataaattataaatttagttatgaaaaattcgtaataataaagttagttatttagggatgttaacgattaatttttattagtaatataattattaggtattttattgatatcgaagataaattgttttttaagatttggttattttatatatttgattatgttttttaaaaatagtagattatgtatttatattttattaaaaataaaatatatatagataatgtattaatttaatttgatattttgttttaaaatttaaataaatattatatgagtgattatttttttgaatttattgaagtaataattatattgagttaagtaaagtgggataaagaattggaataatgttagtatttggattatgtaagagagtggtaaggtggagggaataaattttatgttttttgataggggttgaattaaattcgttaattaagttatttttttttaattagttgttttttttggaattttttttttttttttttgttttttttttgggttttgatatttttatgaatatagaaagattagtgttaataagtaaagagaaaaacgaggtttttattattattcgtttaggtttgttgatagtatatttttagatagattttttattttgaaaggttgtagatatagaatattagtttgatttgagttttgaaaatttatagaatatggaaattaaaatgatttttatttattgttattattatttagatagggtaagatgtagagatggggaatgtatataattatttagaagaaatgttaaaatgaagagtaggaatataggatattatatatatttttttttgttgtatttggaaataaatttttttttttttttttttttttttttttttttttttgagatggagttttgttttgtcgtttaggttggagtgtaatggtgtgattttagtttattgtaatttttgttttttgggtttaagcgatttttttgtattaggttttttagtagttgggattataggtatgcgttattatatttcggttaatttttgtatttttagtagagatagggttttattatattggttacgttggtttggaatttttgattttaggtgatttatttattttagttttttaaagtgttgggattataggtatgagttattatgtttggtttagagataagtttttttaaattgtatttttgttattataaaggtgaaaaaaagggaaattgaaaaaaattttaaaattttgaaaataataatgaaggatataaaaattattttaaattttgttatttagagttagttattgttaatattgtggaagaatttttattttttgtatattaatattttaaaaattttaaataaaattttgattaattaaatatatatatatagtttttcgttttattttttttttttttttttttttttttttttttttttttaagatagagttttattcgttttttaggttggagtgtattggcgtgattttggtttattgtaatttttatttttcgggtttaagcgatttttttgttttagtttttcgagtagttgggattataggtatgcgttattatgtttagttaattttgtatttttagtagagatggcgtttttttatgttggttaggttggttttgaattttcggttttaggtgattcgtttgtttcggttttttaaagtggtgggattataggcgtgagttattgtgtttggttttttttttattttttttattgaataaattatgaaatttttttagatgtaaatatttattttttatttttttttttttaaaataaggtattattttaattatttgagtgttagatattatttttagataatattttaatttaggtataattgtcgtgtaaaatttgaagattaatatttattttgtgagttatttttttgtgagatagtgtatgttaaatatgttgaattggtaggtgaaaaaggaagaaaaaatgagtagtgattggttatttatagttatgaatgagaaattgaaggtagtagattatggatgataaatttatttttggtttttttttgtttttgaaattttaattattattataattatatgagagatattattaataagtaaagttttataattttttaaagatatagattttatgttattataattaaaaattatgtatttttgttatattaataaaattgtatatacgatataaaggtatggataaaggtgaagtagttttaagagatagagtttttgatattattgtaattttaagtatcgtggatattttcgggaaagtttttggatgttattggggattttttttttattggatgtggataatatttttttattatttataggaagtaattttttttataaaagggttttagtcgaagtagtgtttagttgtttttggttgattttatattaaaatttttatattgatttgagatagaggtagtagtgatatttatttgagagattttgtgtttgaataattgttttttaaaacggtaagtgtagaacgttttataagggtagtttcgggttatgaaatatagatatgtaaaaggttttttaataaaaattatatttgtataagtttttattgtattgtagttaaaatttgttttttttttttgatttaaataatgaaagttttaaaatttgtttatttatttgattaaattttgaaataaagattattgtattagtgttttttgtttaaaattttaggatgttgttttaaatattatggtagaataatgtaattagttatttacgatttttttttttaatttattttgtgttttatttttttagg

SEQ ID NO: 130 - DNA, 5379 bp, Artificial Sequence
  chemically treated genomic DNA (Homo sapiens)
tttggggagataaaatataaaatgaattaaagaaggaaatcgtgggtagttagttatattattttattatgatgtttaaggtagtattttaagattttgggtaaaggatattagtgtaataatttttattttagagtttaattaaataaataaataaattttaagatttttattatttaggttaaagagaaaagataggttttagttataatataataagagtttgtatagatgtggtttttattagaaggttttttgtatatttgtgttttatggttcgaggttgtttttataaagcgttttgtatttatcgttttgggaagtagttgtttaaatataggattttttaggtgggtattattgttgtttttgttttaggttagtataggagttttgatgtgaagttagttaagaatagttgaatattatttcggttgaggtttttttataggagggattgttttttgtgaataataggaggatattgtttatatttagtaaagaggaaatttttaatggtatttaaaaattttttcgggaatatttacgatgtttaaaattataatgatgttagaaattttgttttttgaagttattttatttttgtttatgtttttatatcgtatatgtaattttattaatatgataaaaatgtatgatttttaattataataatataaagtttatgtttttaaaaagttgtaaaattttgtttgttagtagtgttttttatgtagttgtggtagtaattagaattttagaaatagaaggaaattaagaataggtttgttatttatagtttattatttttaattttttatttatagttgtggataattaattattatttatttttttttttttttttatttgttaatttaatatatttaatatgtattgttttatagaggaatgatttataaggtagatattaatttttagattttgtacggtagttatgtttaaattaaaatattatttaaaaataatatttaatatttaaatggttaaaataatgttttattttaaaaaaagaaaaatgggaaatagatatttatatttgggaaagttttatggtttgtttagtgaaaaaaataaaaaggaggttaggtatagtggtttacgtttgtaattttattattttgggaggtcgaggtaggcggattatttgaggtcgggagtttaagattagtttgattaatatggagaaacgttatttttattaaaaatataaaattagttgggtatggtggcgtatgtttgtaattttagttattcgggaggttgaggtaggagaatcgtttgaattcgggaagtggaggttgtagtgagttaagattacgttagtgtattttagtttgggaaacgagtgaaattttgttttaaaaaaaaaaaaaaaaaaagaaaagaaaagaaaaaaaataaaacggaaaattatatatatatatttaattggttaaaattttgtttaaaatttttgaaatgttaatgtgtaaagaataaaaatttttttataatgttaatagtgattaattttggatggtaggatttgggataatttttatattttttattattatttttaggattttaaagttttttttaattttttttttttttatttttatagtaataagaatatagtttaaagaaatttgtttttaggttaggtatgatggtttatgtttgtaattttagtattttgggaggttgaggtgggtggattatttgaggttaggagttttagattagcgtggttaatatggtgaaattttgtttttattaaaaatataaaaattagtcggggtgtagtggcgtatgtttgtaattttagttattggggagtttgatgtaagagaatcgtttgaatttaggaggtagaggttgtagtgagttgaaattatattattgtattttagtttgggcgatagagtaagattttattttaaaaaaaaagaaaaaaagaaaaagaaaagaaaagaaatttgtttttaaatgtaatagaaggagatgtatgtggtattttatatttttgttttttattttgatattttttttgggtgattgtatatattttttatttttgtattttattttatttaaatgatggtaatagtaaatggggattattttaatttttatattttgtaggtttttagagtttaagttaagttaatattttatatttatagttttttaaaataggaggtttatttaaaaatgtattgttagtagatttgaacgagtagtggtaaaagtttcgtttttttttttatttgttagtattggtttttttgtgtttataaagatgttaagatttaaaaaaaaaataagaaaagagaagaaaaattttaaaaaagataattgattagaaaaaaataatttaattaacgaatttaatttaatttttattaaaaagtatagaatttattttttttattttattatttttttatatgatttagatattgatattattttaattttttattttattttatttagtttaatgtggttgttgttttaataaatttagaagagtaattatttatatagtgtttatttagattttagggtagaatgttaagttgggttaatatattatttgtatgtattttatttttaataaagtatgaatatataatttgttatttttaaaaagtatggttaaatgtatagagtagttaaattttaaaaaataatttattttcgatattaataaagtatttaataattatattgttaatagaaattagtcgttaatatttttagataattaattttattattgcgaattttttataattaagtttatagtttatttttttttttttttaaaattagtttaaagatatttaaaaatagttttagtggtgatgaagtttttattttatttatatatatatgttttggatttttaattataatttttaatatttattgagtgtttattatgtgttaggttatattttgagtattttgtatgtttatttattgattatttaattcgtataatagtttatgaaataggtatttttattatttttattttatagatgaggaaattgagaatttggggattttattttatttaaaagtatagagttaagggttgaaattaggtagttgatatttagagtttatttttttatttgttattttaaattatgattttttttgttgttatgtttcgagattttttgttttatttaagttttttgtattttttttgtttttttttttttgagatatttttgattattatagttttttattgagataattgtgttttgggttttgagatatgggggttggaagggattttagggatagtgagtagtagggagaggatgtagtgagaatagattttggattttcggtgtataggtagggagaaagtggataaaggaaaaaataagtaaggtaggtggagttatgtttaggtaaagttgatttttaagttatagtttttagaagtttttgatttaaaagtaaattttttttaaggttaaagggtaaattgattattttaaattttaaattgattatttttaaattgagaaagttttagggagagattttaatattcgaaggataagagaaatgaggagtggaagagataggtgagtaatagtaatttaaatgtagattatatataatatataatatatgtagagtatatatatataattataatatattatatatgtggaatatatatattatttatatatatttatatattttatatatatagatatttttatattttatatataaatatagatatttttatattttatatataaatatagatatttttatatatattatatataaatatatgtaaaatattgtgaaagaagaatagaattttgagattttaaatttattatgttaaagggaaagttaagtttgggaaatgagttatgtaaaaattgttttttttttgtttttaaatatttgtaattttatatgtttattttattttatataaaatgtagatgtattgagtatgagatttatgtataatttttttttagttttttttttttatatgtaaagtgtagatttattgagtgttatagagttttgttataatgtaaatatttgttttattgttaatttatttttcgtttatttttttttttttttgtttgtttttttttttttaaagatggaagtttttaaaattttttttggaaaaagcgtaggttatagattttatagtgatttgtgttttttttatttgggataaaataaatttttaatttgttgagatatgttttagttattttttggtttataatatgtatatgtatgtatataatttatatgtatataatatatgtatttgttttaattagaggtatgttatttaaaatttatttatttttataattatttgtatttttttatagtattttttgtgtttttgttttcgaggttgttattgtaaattaggtatatggatattgggagttgatgggtttttttttggttatttgggttgttgaaggggttatagatagatttagtttttttttcgtggagaggttttgggttagcgttgcgtgggagtgggattataattagattatagtttttttatttgtttttttttattaggattttataagaggtaattgtttgttttttgagggtgggggtaaattagggggagttgaagaggaaattgggtaagatttgaatagttgggtatgttgaatattatgaatattatttttttttttaaataatttaaaatatatttttaagaaataggttgattagaggtgttttaaggttttattgaattttttaagttttgaagatgtagttagttgttatcggattgtcggtttttaagtttcgttttatatggatttttttggtagtttttcgtatgggggaagtattcgttatatagatgggaatgaaaagaggaaagaagacggtgtaaatttaggtatatttcggtgtttgttattagtgttatttaatttttgaggtgttattttttttggttttattgtttttttttggaagttttttgtttttttttttatattttttaattaggtattaaagattttaattagttttgttgtgtgtttaggtttatttatttttatttttatggtaaagggagtgggagatagagagatagttagaaagaagagattggggattttaagataaatgttagaattttaattaaggttattttgtggataggagattattgggtttagtggaaagtagtattggttataattatacgtggtaaaagtatttatcgaggagtgaagttatatttggtgaatgtgatcgggaagtaggggtagtggtgtttttttgtttttttgaggtattttg

SEQ ID NO: 131 - DNA, 6070 bp, Artificial Sequence
  chemically treated genomic DNA (Homo sapiens)
gagttttatagattggaggagaaatttagaagtttagtttgggatatgtaaaatatgagaggtttattgaataattaaatttgtttggggatggagatgttgagtaggtatttggttataggagaatggttttggttgtatagaatttagaattcgttcgtatttaaatggtatttaaagttaagagtgtgaattggattattaagttagtgaggttagatatagaagagtaaagcggtgatttttggagtattttaagggtttggaggttggggagatgagggagaattaatatatgatatagaagaaatagttagtgaagtaggaggaaaattaggagttttttggtgaagtaagatgaggatggagaataggttgtttgtgttagtgaagtgtaggattttggtgagagtagttttagggaattggtgtggttgaaagtttgattggataagttttaagatagaattatagtttgagtaatatagtgagattttgtttttataaaaataaaaaataaaaaaattagtcgagggttggggtatgtgtttgtagttttagttatatgggaggttgagggagaaggggtattagattttaggattttttgagtgtaatgagttatgatcgtattattgtattttagtttgagtgatagagtagtatttttattttttagagaaagagagagagagattgagagaattagaggagaggatttagaaaaaagtaagtttagatattttttttagggtatagtgggagtattggtatttttataagtttttttggttttacgtttttttttattttattatgttttttaagtttttgttataagtttagtttaatgattaagagtatggatttggaattgattggtttttgtttaaatttttaattatgttttttattagttatgtgattaaggtaattttttttttttaaattttttttaaattatattttaatttttgggatatatgagtagaacgtgtaggtttgttatataggtatatatgtgttatggtggtttgttgtatttattaatttgttatttatattaggtattttttttaatgttgttttttttttagttttatattttttgatatgttttagtgtgtgatgtttttttttttgtgtttatgtgtttttattgtttaatttttatttatgagtgagaatgggtaatgtttggttttttgttttagtgttagtttgttgagaatgacggtttttagttttatttatgtttttgtaaaggatatgaatttatttttttttatggttgtatagtattttatgatgtatatgtgttatattatttttatttagtttattattggtgggtatttgggttggttttaattttttgttgttgtgaatagtgttttaataaatataagtgtgtatgtgtttttatcgtagaatgatttataattttttgggtatatatttagtaatgggattgttgggttaaatggtttttttagttatagatttttgagaaatcgttatattgttttttataatgattgaattaatttatatttttattaatattgtaaaaagtatttttatttttttatattttttttagtatttgttgttttttgattttttaataatcgttattttaattggtatgagatggtattttattgtggttttgatttgtatttttttaatgattagtgatgatgagtttttttttatatgtttgttgattgtataaatttttttttttgagaagtatttgtttatattttttatttattttttgatggtgttgtttgtttttttttgtaaatttgtttaagttttttgtagattttggatattagttttttgttaggtgaatagattgtaaaaatttttttttattttgtaggttttttgtttattttgatgatagtttttttttttttattgtgtagaagttttttagtttaattagattttatttgttaattttggtttttgttgttgttgtttttggtgttttagttatgaagtttttgtttatatttacgttttgaatggtattgtttaggtttttttttagaatttttatggttttaggttttttatttaagtttttaatttattttgagttaatttttatataaggtgtaaggaagggatttagttttagttttttgtatatggttagttagtttttttaatattatttattaaatggggaatttttttttaattgtttttttttgttagttttgttaaagattagatggttgtagatgtgtggtgttatttttgatgtttttgttttgtttcgttggtttatatatttgtttttgtattagtattatgttgttttggttattatagttttgtagtatagtttgaagttaggtagtatgatgtttttagttttgttttttttgtttaggattgttttggttatataagtttttttttggttttatatgaaatttaaagtagtttttttttaattttgtgaaaaaagttagtagtagtttgatggggatagtattgaatttataaattattttgggtagtatggttatttttatgatattgattttttttatttatgagtatggaatgtttttttatttatttgtgtttttttttatttttttgagtagtggtttgtagttttttttgaataggttttttatattttttgtaagttggatttttaggtattttattttttttgtagtaatcgtgaatgggagtttatttatgatttggttttttgtttgtttattattgttgtataggaatttttgtgatttttttatattgattttgtaatttgagattttgttgaagttgttgattagtttaaggagattttgggttgagataatgggattttttaaatatataattatgttatttgtaaatagatataatttgatttttttttttttatttgaatatattttattttttttttttgtttgattgttttggttagaatttttaatattatgttgaataggagtggtgagagaggtatatttgttttgtgttagtttttaaagggaacgtttttagtttttgtttatttagtatgttattggttgtgggtttgttataaatagtttttattattttgagatacgttttattaatatttagtttattgagagtttttagtatgaaggggtgttgaattttatttaaggttttttttgtatttattgagataattacgtggtttttgtgattggttttgtttacgtaatggattttgtttattgatttgtgtatgttgaattagttttgtattttagggatgaagttaatttgattgtggttgataagttttttgatgtgttgttggatttagtttgtcgtattttattgagtattttcgtaatgatgtttattagggatattggtttgaaattttttttttttgttgtgtttttgttaggttttagtattaggatgatgttggttttataaaatgagtgagggaggagtttttttttttttattttttggaatagttttagaaggaatggtattagtatttttttgtatttttggtagaatttggttgtgaatttatttggttttgggttttttttagttggtaggttattaattgttgttttaattttagaatttgttattagtttatttagggatttgatttttttttggtttagttttgggagggtgtatgtgtttaggaatttatttattttttttagattttttagtttatttgtgtaaagatgtttatagtaatttttgatggtagtttgtatttttacgggattagtggtaatattttttttattattttttattgtgtttattgattttttttttttattagtttagttagtggtttatttattttgttaatttttttaaaatgtagtttttggatttattgattttttgaaggttttttcgtgtttttattttttatggttttgttttgattttagttattttttgtttttcgttagtttttgaatttgttttttaatttttttgagattttttagaatggggataataattatatttatagtagagagttgttataaagattaaataatataataaatatggggcgttgagttttagagtttttgttgttgttattattatttttttaaaaatgtaaatttgatttgtatttgatttattgatttatattagtgggtttttttttttattgttttttattatatgggttttaattttatatgtagttttataaaattattttattttatagtttaagaatattaaaggtatttgtaggtttttaaatttatacggtgaaaagttagagagtatgggttttttttaggggttaattttaggaagtgttattaataaggacgtttattaggtggtgagtaaggaaagacggaggtgaaggaatcgaaacgagttaagtttattgtttagttttattgaagttttgtaaatattataaatatgtttgaaatgtagttttgatttgtagtatttgtaatttttaagggttatttattataggtagttaagagttagtttagtatttatgaaaaagataggggagggtggtggaaaagaaggaggaggaggagagagagaaggaggaagaggagaataagaattaaataaaaataagaataagaataagtagaagaagaggagtaggaggaaaaagaagaggaagaagaatagtaataataatgagtgaaggaggaggagggtaaggaaagatgtataggagaatggaaggaaggatagaaaggagggaaggaagagagaatttagttatattattttttgattagtagtttatttttgttttagtgggaggtaatagaggttagtttaggaaaggggtggggaaagaggaaagagaagtgtaggaggaaggggagggaaaaggggaggaggaggaggatgtgagattgggttagagaaatgaaagaaagtaaggttttttgttgatatttagtgtagtttatttgtagtatagtatattttttttgggtaaggatttgagatttttgtgttaagttaagaggtttaatgggttgtagaagaattagagaaggattaagtaaagttatggtgagttttttagtttaaaagacgtttagatgtttagatagaaatttttggggttgtagaggtaggtggtaaggataggaattattttattttaattttggttttaaataatatagaaattaaatatttttttagatttttaaaaaaagtgattttgaaatttttttttttagatatgttgattttttttttttgattttgtttttggggagatttttgaagaaatattattgaaattagattttttgtaataaatattgtgtttatttgagaagtgatatgttttggaagatagaatttttttaaaattatattttaagttttagggtatatgtgtataatatataggtttgttatatatgtatatatgtgttatgttggtgtgttgtatttattaattcgttatttatattaagtatattttaaggtgtgtaggaaatttgtgattttgttattttagttgtttaaaaaggtatttttttttattaaaaaaagaaatattttttttttttggtgtttggttatttaattttttttttttttaggtatttgaggtattgatttattatgattaagagtgaggttataatattaaatataagtattaatagttaattaagtagtaataatattttaaaaaatatatatagtaaatattaaatagttttatttaatagtttagtagaaaagtaggtataaaaattattaaattatagaaaaaatttagggtagtatcgattagtaatttgagattaaagcgtaaaaataaaatagaataaaataaaattgtgtattagttttgatgtaaatttgaagtaattttttatttatgtttgagaaatttgttattttagatagggttagtagatatatgtgttttattttgattattaagaaagttgtaagtattattttaaaggttataaatgtgtggtttaagagtatatatttaaatataattttgtattttatttgtaga

SEQ ID NO: 132 - DNA, 6070 bp, Artificial Sequence
  chemically treated genomic DNA (Homo sapiens)
tttgtaaatgaaatataaaattatatttagatgtatatttttaaattatatatttatagtttttgaggtggtgtttataatttttttaataattagaataaaatatatatgtttattaattttgtttgaggtaataggttttttagatatagatgaaaaattattttaaatttatattagaattgatgtatagttttgttttgttttattttatttttacgttttagttttaagttgttaatcggtattgttttgaattttttttatggtttggtaatttttatatttgtttttttgttgagttattagataaaattatttaatatttattatgtatattttttaaagtattgttgttgtttaattaattattgatgtttatatttaatgttatagttttatttttgattataatgggttaatgttttaaatatttaaaaaaaaaaaaaattagatagttagatattaggaaagaaaagtatttttttttttaataaaaagaaatatttttttgagtaattgaaatgataaagttataaattttttgtatattttaaaatatatttaatgtaaatgacgagttaatgggtgtagtatattaatatggtatatgtatatatgtgtgataaatttgtatgttgtgtatatgtattttagaatttaaagtataattttaaaaaaattttattttttaaagtatattattttttaggtagatatagtgtttattgtaaaagatttgattttaatagtatttttttaagagtttttttagagataaagttaagaagaggaaattagtatatttgagaagaaagattttaggattattttttttgagggtttgagaaaatgtttagtttttatattatttaaaattagaattgaaatggggtgatttttatttttgttatttgtttttataattttaagagtttttatttgagtatttaaacgttttttaggttgaaaggtttattatggttttgtttggtttttttttagtttttttgtagtttattgagttttttgatttagtataagggttttaggtttttgtttaaagggagtgtgttgtgttgtaggtagattgtattgaatgttaatagaaagttttgtttttttttatttttttaatttagttttatatttttttttttttttttttttttttttttttttttttgtattttttttttttttttttttattttttttttagattggtttttattgttttttattgagataaaaatgaattgttgattagaaagtaatgtgattagattttttttttttttttttttttttatttttttttttatttttttatgtatttttttttatttttttttttttttatttattgttgttgttgttttttttttttttttttttttttttgtttttttttttttatttgtttttgtttttgtttttgtttggtttttgtttttttttttttttttttttttttttttttttttttttttttttattatttttttttattttttttataaatgttaaattaatttttggttatttgtggtaaatggtttttggaaattgtaaatattataaattaaaattgtattttagatatatttatgatgtttgtaaaattttagtagagttaagtagtggatttgattcgtttcggtttttttattttcgtttttttttgtttattatttagtggacgtttttgttagtggtattttttgaagttaatttttgaagagagtttatgttttttagttttttatcgtgtaggtttgggagtttataagtatttttaatatttttggattataaaatgagatggttttataagattgtatgtgaaattaggatttatatgatgaaggataataaaaaggaagatttattgatgtgagttaatgagttaaatgtaaattagatttgtatttttaggaaaataataataataataataaaaattttgaagtttagcgttttatatttattatattgtttaatttttataatagttttttgttatagatatgattattatttttattttaaagagttttaaagaggttaagaaataaatttaaaaattagcgaaagataagaaataattaagattagagtagaattataggaggtagagatacgaaaaagtttttaaaaaattaataaatttaggagttgtattttgaaaagattaataaaatagatggattattagttagattaataagaaagaagaattaatagatataataaaaaatggtaaaggggatattattattgatttcgtagaaatataaattattattagagattattataaatatttttatataaataaattagaaaatttagaagaaatggataaatttttggatatatatatttttttaagattaaattaggaagaagttaaatttttgaatagattaataataagttttgaaattaaggtagtaattaatagtttattaattaaaaaaagtttaggattagatggatttatagttaaattttattagaggtataaagaggtgttggtattattttttttgaaattattttagagaatagaaaaagaggaattttttttttatttattttatgaggttagtattattttgatattaaaatttggtagagatataataaaaaaagaaaattttaggttaatatttttgatgaatattattgcgaaaatatttaataaaatacggtaaattgaatttagtagtatattaaaaagtttattaattataattaagttggttttatttttggaatgtaaggttggtttaatatatataaattaataaatagaatttattacgtaaatagaattaattataaaaattacgtgattattttaatagatgtagaaaaggttttggataaaatttaatatttttttatgttaaaaatttttaataaattaggtattgatggaacgtattttaaaataataagagttatttatgataaatttatagttaatagtatattgaatgggtaaaaattgaaagcgttttttttaaaaattggtataagataagtatgttttttttattatttttgtttaatatagtattggaagttttggttagggtaattaggtaagagaaagaaataaagtgtatttaaatagaagagaggaagttaaattgtgtttgtttgtagatgatatgattgtatatttagaaaattttattgttttagtttaaaatttttttaaattgattagtaattttagtaaagttttaggttataaaattaatgtgaaaaaattataagaatttttatatagtaataatagataaatagagagttaaattatgagtgaatttttatttacgattgttataaagagaataaaatatttaggaatttaatttataaggaatgtgaaggatttatttaaggagaattataaattattgtttaaggaaataagagaggatataaatgaatggaaaaatattttatgtttatgggtaggaagaattaatattatgaaaatgattatattgtttaaggtaatttatagatttagtgttatttttattaagttattattgattttttttatagaattagaaaaaaattattttaaattttatatggaattaaaaaagagtttgtatagttaagataattttaagtaaaaagaataaagttggaggtattatgttatttgattttaaattatattataaggttatagtaattaaaatagtatggtgttggtataaaaatagatatatggattaacggaatagaatagaggtattagaaataatattatatatttataattatttgatttttgataaagttgataaaaagaagtaattgggaaaggattttttatttaataaatgatgttgggaaaattggttagttatatgtagaaaattgaaattggattttttttttatattttatataaaaattaatttaagatggattaaagatttaaatggaagatttaaaattataaaaattttaggagaaaatttaggtaatattatttaggacgtaggtatgggtaaagattttatgattaaaatattaaaagtaatagtaataaaagttaaaattgataaatgggatttaattaaattaaagagtttttgtatagtagaaaaaaaaaaattattattaaagtgaataggaaatttatagaatgggagaaaatttttgtaatttatttatttgataaagggttaatatttaaaatttataagaaatttaaataaatttataagaaaaaataaataatattattaaaaagtgagtgaaggatatgaatagatgttttttaaaagaagaagtttatgtagttaataaatatatgaaaaaaagtttattattattggttattagagaaatgtaaattaaaattataatgagatgttattttatgttagttagaatggcgattattaaaaagttaggaaataatagatgttggagaggatgtggagaaataagaatgttttttatagtgttggtggaagtgtaaattagtttaattattgtggaagataatgtggcgattttttaaggatttataattagaaaaattatttgatttagtaattttattattgggtatatatttaaaggattataaattattttacgataaagatatatgtatatttatgtttattgaggtattatttataatagtaaagagttggaattaatttaaatgtttattaatgataaattggataaagatgatgtggtatatatatattatggaatattatatagttataaaaaaggatgagtttatgttttttgtagggatatggatgaagttggaaatcgttatttttagtaaattaatattggaatagaaaattaaatattatttatttttatttataagtgggagttgaataatgagaatatatggatatagggaggggaatattatatattggggtatgttaggggatgtggggttaggggaggaatagtattaggagaaatatttaatgtagatgataggttgatgaatgtagtaaattattatggtatatgtatatttatgtaataaatttgtacgttttgtttatgtattttagaaattaaagtataatttaaaaaaagtttaaaaaaagaaagttgttttagttatataattagtaagagatatggttgggaatttgaatagaggttaattagttttaaatttatgtttttgattattaagttgaatttatggtaggaatttggaagatatggtaaaatggggaaaaacgtggagttagggagatttgtgaaagtgttagtgtttttattatattttgaaagaagtatttagatttatttttttttaagtttttttttttaatttttttaatttttttttttttttttttaagagatgggaatgttgttttgttatttaggttagagtgtagtggtgcgattatagtttattgtatttaaggaattttagggtttagtgtttttttttttttagttttttatgtagttaagattataggtatatgttttaattttcgattaatttttttattttttatttttgtagagataggattttattatgttgtttaggttgtaattttgttttgaagtttgtttaattaggtttttagttatattaattttttgagattgtttttattaaggttttatattttattaatataaatagtttattttttatttttattttattttattagggagtttttggttttttttttattttattggttattttttttgtattatgtgttgatttttttttatttttttaatttttaaatttttggagtattttagagattatcgttttgtttttttgtgtttaattttattaatttggtggtttaatttatatttttgattttgaatattatttaaatgcgaacgaattttaaattttgtataattagaattatttttttgtagttaaatgtttatttaatatttttatttttaaataaatttagttgtttaataagttttttatattttatatattttaaattgaatttttgaattttttttttaatttgtagggttt

SEQ ID NO: 133 - DNA, 15951 bp, Artificial Sequence
  chemically treated genomic DNA (Homo sapiens)
ttggttggtagtttttttttttttaatattttgaatatattattttattttttttgggtttagaagtattttgttgagaaattttgtgatagttttattgtaatttttgtttgtgatatgtttttttttttttgttgattttaggattttgtttttgtttttgatttttgatagtttgattattatgttttggtgtagttttttttggattgaatttgattggagatttttaagttttttgtatttgaatattaatattttattttagatttgggaaatttttagttagtaatttttaaatatgttttttgattttttttttttttatttttttttttttaaattattgtaatgtgaatattagtttttttttttaatttttaatttaatttttgtttttattttttgagatgtagttttattttgttatttaggttggagtgtagtggtatgattttagtttattgtaatttttgttttttaggttgaagagattttgttgttttagtttttttagtagttgggattataggtatgtgttataatttttggttaatttttttgtatttttagtagagattgggttttattatgttggttaggttggttttgatttttgattttaggtgatttatttattttggttttttaaagcgttgggattatggtatgagttattgagtttggttgaatgttagtttttttgatgttgttttataaattttgtaggtttttattatttttttttatttttttttttttttttattgtatatttttaaaaatttgtttttagtttatagatttttttttttgtttgattaagtttgttattggtgatttttattgtattttttattttatttattatattttttagttttaattttttttatgattttaatttttttgttatattttttatgttgtgtatttattgtttttttgattttattaaattgtttttttgtgtttgttttaaagtaattgagtttttttaaaaataattattttgaatttattgttaggttatttgtagtattttattttttttgggttagttattgggaaattattgtgttttttaggtggtgatattttaatttgggtttttatgttttttgttgttttatattgttgtttgagtatttggtggatttgttttaattttaggttgtatgggttgattttggtggagaaatatttttttatgtggaataatgcgaggatgttggttgggtgggatgtaaaagttttgattttagtaggggtaaagttgtgtggtttttatgtagatttgttagttgaggttggtgttagtgaatattatagggatttttagaggttaatattgtgggtatttatagtggtaatgaggttgttgaggtttttaattgtgataagttttttatatttttttttttttttatttgggaagttatgattgaggatattttttttggaattaggtttaatttgtaggtttgtttttggtggtggtgatattggtgtttgatgaatagtgtttatggagtggttaagagttaaggtttgaagtatgggtatgtatggagggattatagtattagatttaattgtagtaatggtattagtgtttaaggtataggtatatttattattatattgataatggtgtgtaaaatgtaggtatttataaagtagttaaggagttagggattttattgtatgtatacgtagagttatagtggttttaggatttagggtgtgggttagttttttttggtggttgagttggtgattagagtatggataggtatagagaaattttgattttaggatttagggtgtttattagtttattatagtggtggttttggtgttggaggtgtgggtgtgtgtagtatagttttagagatagggtttggagcgtaggtgtgtatattattatagtagttttggagttgagaatatgggttatttttttatagtggttgaattagtgtttggagtaaagatttttatagagagaatttggtttggggttttagggtgagatttagtttataatagtagtgattttagtgtttgagatatgaggaggtgtattgtagttatagagttatagtttagagtgtgaatatttgtagagtagttataatttttggggattaggaatatatatagatttgtgagaggtggtaattttggttttagttttggggtagtgtaataatagttgttttttggtgagggggtgtgaggggtagtgtaattgtgtttttttttttagtattttgttatgggaatggttgttggataaaagatgttagtgttttttgtggagtaggatattgggggttttagtggttttgtgttatatgattgatatagatagtttataaatttttttattcgtagttattttttggtgttttatatatgttagttttatcggtgatttttttatatggatatttttttttttttttattgtgttgttttaaattttttaataggtttttgagttttattttttaattttttatttttgtgagggttattttggtttgtgtataattgtttatgtttgtttttttgttggggtataaggttgatattttttattttattattttgttaatgttatttgtataggaatttttttatgttttttttatatttattaaaatttaataatattaaatttaaaaatatatgattaattgaatttattaatattaaatttattataaataagaaattattaggttgggtatggtggtttatgtttgtaattttaatattttgggaggttgaggtgaaaggattatttgagtttaggaatttaagattagtttgggaaatatagagagattttatttttagagatttttttttttaattagttagtagtgatggtatatatttatagttttagttatttaggaggttgaggtgggagaattgtttgagtttaggaggttaaggttggagtaagtagtaattatgttattgtattttagtttgggtcgtagagtgagattttgttttaaaaaaagaatttattagtttatatattatatttttttatttttatttgagattatatatattttttttaatatgaggtaatgttaaaaagaggggttggtgagtgaaagtaagaatagaaagatatggaggtaagttttatagaataatagttaatatttaaatttatatttaatagcgtgataggtattgttttaaatatattaaatttatttaatggtttttatatgtttatgtatttggtgattattatttttattatttatattgttgagtgtattattttgtttttatgatgttgatagagatatattcgagattggataatttattaaaaaaaaaaaggtttaatggatttatagttttacgtggatggggagtttttataattatggtagaaagtaaaagatacgttttatatggtagtagggaagagagagaaatgagaattaaataaaaggggtttttttttataaaattattagtttttatgcgatttatttattattatgagaatagtatgggggaaattatttttatgatttaatgatttattaggtgttttttataatttgtgggaattatgggagttataattttagatgagatttgggtggggatatagttaaattatattattgaggaaattgagttatagggagattagtaacgtttaatatagttggtaggtggtggagttaggtagtttgattttagggtttggattttgaattgtattatgttgttaagaagttttttatttttttttttttttaagttttttttatttttttatagttatttttttaatagtattttttttattattttttttatttttattatataattaattttttttttttggttttaaattttaacgtgtaaatgtagttttatatattttaatttatttttatttttagatttttttttaatgtttttattttattttattttaaatttatttatgagatgtttatttataagttgtaattattatgaagtgaatgaagaataatatttattattgtataatagaattttaagagtataaataggagttatggttttttgatttgaaattaaatatttgatatttgattttgttgtttgagattaatttgaaaagtaataataattattaatatttgttgagtattaattgtgggttaagtgttattttaattattttgtatatattaatttattttattttataataattcggtgaggtaagttttgttattttgttttatagttgaggaaatagaggtatagagagtttaagtagtttgtttagtagatagttagaagaggagttaggatgggtttcgggtagtttaatagtatagttgaagttttaattattatgttaatagttttttggttttatatattttatgggaagaggaaaataaaaaggtatttatttgtatatttttttatttttgatataagaagtagaattttttttatatgatttatgtttatttaatacgttattttgaaatttattaataaaattttttaagcgttagaaaattgttagtggttttttttatttttttttatttttttttgtgttattaattttgttttttttttttagaaggttgtcggaatagtaaatatttattgatatgttataattattggaaaatgggtattggaaaattatattgtaattaatttaaagtatgttttttaaatgtattattttaaattggagtttatattataatttaaggaaatttttgtgtgtgtattgtttttatattgtttagtttgggatatttaggagtaatttattttgcgtttgtttttagattattttttatggaagggggtgattttttgttttttggtaattattatttttaagttgttaatattatttttgtattattaatattttaattttatgggaagggttgtggtgagtttttggaatgtgaataggaagttgtttttttaaatagtttgatattgaggggaggtagtgagattgtaagtagtttgggttgggtagaaggtagaaaattagtagagttatagaggagatggtgagtttatttttttttgtatgggaagtggttgaagtgagttggagtggtatggagtaaagttaggtaggtaaaggtttagaaagtgaggaatagcgatagttatggagttttatgttgaattgtttattagattttgtgagtatttttaaatttgttgtttattttgatttttttaatatttttgtgagttgaggttgttatttttattttataaataaagttatcgtggtttatagaggttgtgttttatttaagttttattgttaggttatatgatgttgggatttggggtttgttttttggtttcgtagttgttgttttttttattagaatttataggggttttttgagaatagattatggtaaatttgttattttattttttaagattgtatttttttttgggataaatgatggaataaatggaagattgggtaggtgttttgggataagtttataattgaatagttttttatttttattttttttatttttttttgtgagtttatgaattttttgggattgatttggaatatttatatagtttttttttttgttttaagatttaattttgttaatgatttagtttttttttttataaaatggatatagtaataatattttatagttttattatgaggattaaataagattttgttgaaaagtatttagatttgagtttgatatatagtaagtgattagtaaatgttagttattattgttataataaaaagaaaatttttaggaatagtggggtttaggatttagggaagatttaaggatagttaggtattttgaatttagtaatgttatatgtttatggataagatgtacgtggttaggttatttttaatttagggaagatttaaggatagttaggtattttgaatttagtaatgttatatgtatttagataaaatgtatatggttaagttatttttaattttttttagattttttaagagtattttatatagttttagggttcgaaattttgtagtttgtggttatggaggaattaggtaggtttttgtttttgagtatttttttgtgggattttagaaaaaagtatcgtatatatttgatttattttattgttttgttttattatagtatattttttaagtatttataatgtgggtttttgtgttggggaaaataggaataagagtatgataaagagaagaggaaggagtttgagtttgttttaagtttgaattataatgatttaaggatatgaattatttttgttttgtttttttgtatgttatatttttgaattggttaatttaaatgagtagttattttttttttttttttattttttttggtatttttttttattttaaaggtatgaatttattggattagagagttttttgagattttgatgaaagttataatttgttttttttagatgaaagtaaaaatatcgatataaatattaatttttagagataattataggaggtttttagatttttatgtggattttagggtaagaatttttttcgattgttttttgggttttatgtttagaagttttttttttggtattttgaaattaggtttgagttttatagcgaagtgttaaggttttagttttggaatggtttttaatattttaaagataagatttttttttttttttttgagtatatttggttttaaagatttagaaattttaaattgtttgtgtaaattttgttttaagtttagagagtggttttaattaatttttaggatttgagaaaatgaggataaggtttttttggtggggtatttttaattagatagattttagaggagtagtttttgattgggaatttatagttaaattgtattgatgtttgttaaagttttagcgggttatggtcgggtttagtggtttatgtttgtaattttagtattttgggaggtcgaggcgtatagattatttgaagtcgagagtttaagagtagtttggttaatatggtgaaatattatatttattaaatttataaaaattggttgggtatgttggtatgtgtttgtaattttagttatttaggaggttgaggtaggataaatttttgaatttaggaggtggaggtggtagtgagttgagattatattattgaattttagtttgggtgatagagtaagatttgttttaaaaataaaataaaaaaaaagttttagtgggttaaggagtaggtttggattttcgtttatttatattttttaattattttatgtggtttttagtttttatttttttttttattatttgttttttaaaatgtaattaaaatagtttagatttttttgggttagttattagtttttagaatgtgtatttttagagatttttaagtagaagtttattgattaaatttttaaaaattaaaatgatttattatataaaaaattgtgtttagaaaaaattttggatttaaatttagagagtaggtatatagtggttttataaatgatatttattatattgtttttaaggtgtttaatttttttgattaaaaagtaaattagaaattttatgaagttaaatatagagtaaatttttattatttgtagagatataatttatttttgatttaatagattttttaaaaaattttaagtgtcgtattttatttttaatgttaatattttatttaaaataatggtaattggtagtttaaattaaatatatgtttggattttaagtgttgatgttttgggtttttttttgtttatatttataatttgttttttggtttagagataatttttttttttattgtatttttttttttatttttaagttgggttattaatatttgtgttatattattaatattattatcgtttagaaatataagggaattaatgtattagttgtaatagtttgtaatatttgggttttgttattaataagttgtatagttttgtatttttaataatttttatatttattttttttatttgtatttttattgatgttagattaaatttgtttttttttaatttttattgggattattgtaatagtttttttttttgtagtgtaatttttttgattgtaatttatttaaaaaaaaaaaagtatcgtattatttttatttttataatattagtatttttggaggttaaagaaaaagtattgtttgagtttaggggttttaggttagtttgggtaatatagtgagaatttatttttataaaaaattagtcgggtgtggtgatgtatgtttgtagttttagttatttaggaggttgagatgggaagattatttgaggttaggaggtggaggttttagtgaatttagattatgttattgtattttagtttgggtaatagagtaagattttgttttttagttttataaaaaaaattatattattattaagtgtatgtgtttatgatatttttttgtttagaagtattttttttgttaattggtatttgtgatttataagatatggttttaaattatttttttagttaatttttaggattttttaatttttagtaggttggagtgtagtagtgttattttagtttattgtaatttttgttttttgggtttaagcgatttttttgttttagttttttgagtagttgggattataggtatgcgttattatgtttagttaatttttgtattttttagtggagttggtttcgttatgttggtaaggttggttttgaatttttgattttaagggatttgtttgttttggttttataaagtgttgggattatagatgtgagttatcgtgtttagttttcgttggtttattattgtatttagaataaaattttatttttttgttttggattttaaagttcgatgtgatttgttattattttcggttcgtatttttttttttattgtttattttattttggttatattaatgtttttatgttttttgaatatattgtagtttgtttttattttaaggtttttgaaatagtttttttttttttttttaatgtttttttttttgttttttattggttggttttttgtagttatttttttttttatttaaatattattttattaaagaggttttttttgacgtttttgattaatatagtgatatagttattttattatataagttttattttttatttagtatttatggttatattttgttaatattttttatgtttatttgtttagtattgttgtgtagttattagtatttgttttattgttttttttattaatagaatgtgtattttatgaggattggaattatgtttgtttttattattttatttgtttatttagttattattattattgtaaaagtaatgtatttagttataattattatgtatttttttaatatttttttatttagtatatttttgttttatttttagttatttttttgttattatttatttatatatttatttataaaatgtttattgagtattgagtatgtgttttattatggttggggatttagatttgagtaagtaatagtttttgtttttgagaagtttttgttagtagtttttttagttgtatgtttatatgtttgttgcgtatttaaattgtggattttttgtttaagagaatatttagaaacggagatgttgattagaggatattggaaatagatgattataaggaggttatttttattttttaggaaagtagaagaatgagaagagaatagggttatggaggtgggaatttagagaaatatttatttttgtaagggaaggtagaggattgaggtagatttagaagaagatttagaaaagttttttaaatattagagtagaagaataatagaagagttaagggaagtattttaggtaaaaggaagtagtggtatttattgttatagaaaggttaaggaagataagggtggaaagtttttatttggtttggtaatgaggatgttagtaatgaagtttgtagggatattttgataggatggtcgggtagtgggttggagagtaagggggaggtaaggaagttaagaaagtttagttataagaggaaggagagaaataggtagatgtgggtaggaggataaagggttaagggagggatattgtttgatttcgtttttttaaaagtataaagttgtggtttataatgtagataaaaagaataagattttttttttgtggtattatttttgttaattttgtaagttatttggaacgtggtaagttatgggatatttattagtttttggtatttttttgtgtgaaaagttaggttaaggtatttgttttttttattttttttttgtttttttttttattttgtaattattattagtttttttgtttgtttgtttgttttgttttttgagaaagagttttattttgttgttaaggttggagtgtttcggtttattgttatttttgttttttgggtttaagcgatttttttgttttagttttttaagtagttgggattatagatatgtgttattatgtttggttaatttttgtatttttagtagagacgaggttttattatgttgttaggttgttttcgaatttttgattttaagtgatttgtttattttggttttttaaagtgttgggattagaggtatgagttattgtattagtttagttttttattaaagtaaaattaaagataattatggtatttaatgaaggtttatataggtataggatgttattttaatgatttagtttttgatttttttttagtaatttttagttgaattagttttttagagaatattaaagattagtagagtatgtggatgtttttagagaggaatttttttttgttttagtatttaatttgtttagtaatataggatagagtagtattttgtagattataatgtagagtaggagtaggtatgagaaggtttgtttattttaagtaggttttagaggaaaattgttatttaaagaagatttttaaatattatttattttttatatttttatataaaatttttattagttgttttatagttaatatagaattttgaatttgggttatattaaatatggatagatttagtaggttatgaattatttgagattttttaaattattgtaagtatgtatttgttttgaagaaatttgattacggtttttattagatttttaaaatttataagttttggaagaataagaataattgtgttaattttatgtatatttatgtgagtaagtttgggtaaattatttacgtttattgagttttagtggtggggagtggtggttgttttattttaggtattcgaagtttgaaagattttttgtagaatagtagataaatgttaagttggtttggaagtgatttttatgtttttttatagttttgaaataatttgtaagaggtgaattttggtatttggtgatgtatagaaatagaaaagtacgttagattaaagtaggggatgtatattgatttgtattttttttttttagatgttgtgtttttattaaaagtattgtattagttttttaaaatttttaaatgtttaaaataagttgtttcgtttttttttattttgttttattttgtgtggtagagaatttgttgatgaaattttgtttaaaaaaagtttaaataaataaataaataggttaaaatgggaaatatttttttttggaaattttgtttaaattaaattttatttaaaagtttaaataaataagttaaagtaggaaatagtgggtagggttggttattgtgatgggagattgggagttttatcgattttttcgttttatatatttttgtgagttggttttaaagttagggaaatttttagaaatattttgtttagggagaaaattatttttataggaagagtattattaaatttaaaatcgttgtattttttttgtaatttgtttgaatagagtaaagtttaggtttaaaggtaagtatttaggttttttttatgaaggttgtagagttgtgttttttagtagtaatatttttgtttttatatttttaaaaatattttggaatattatgttattttttatatttttttaagtggaaagttataattttttattttaaattttaaaagtaaaagaagattggattttttagtgtattataaaaattagattgtaaaaataaaattgttatataattttttaaagtttatttaatggaataaagtattagtatgatttgtaatttttattatttaaaagattataagtaggtttttaagaaattttatattatttatttttttttttttgaatagttatttttattttatttttatagtatttagtttaagattatatattttaagtttaaagtatttttttgattattatatttttttgtaaaataaaaatataaaattttaattttttataattgtaagtttttatgtgttaaaatgttttttttttttattgagttagtatgataattatttttagtatataattaaataaagtaaatatattgtaagttttgataagtaatttaaatttttatatttaaattgttattaaagatttatttttaagataggaggagtttttttttatttgtttatatatttatgaatgaatattatttattaataaaattagataagtttggtattaatattatttttatattttatttttaaggatttaaatattgagaaattttatttatatgaataagtaaatggaattagaagttttattatagtaatgttttaattttttgaagtttttttaagttatatgttttaaattatatagtgatttattattaaaatttagttagatttgataatttaatcgggtgtttttttaaagttgatgaaaggaaataaatggaaattattagatttgaaaacggatttgttgtaatattatttataatatttaaatttttaatatttatattaatatttcgaattatttttggtatacgaatgtatttatatttaaaggtaaagttttggaataaataagaaattagtaaaaggtataattttttttttataaagtgggagaaaggtgtattttaggtagattgtttttaagaaagtatatatgtgaaagttgagaatttgaatatagatttaattaatattttttttgtttgtgaattttttgggaagttagttttattttggtttgaagaattttattttagtatttggaatggtgtattttgaaatgtgataggaagaatagtttgtgatataatataatttagagaaagtagtggggttaggttcgtattaaagggttatcgattattttgtattttgtgtaaataaatagttgtaaattataacgttatgatatttttagtgtttaattataggttttgtagagattagtagtttataagaatataaaatatgtttatttattaaagttaagatttagaagtttttagatgaaaagttttaggtttatgagataattttattttttgggatatattaattggtttgagttgagttttttttggtatttggttaggttgtagttaaaagtgtatgaatatatgtatatatatgattttatattgttttatgtattttattgggcgtgatatatatataattttatattgttttatgtattttatataatttattattgggcgtgatatatatatatatatatatatatatatatatataattttatattgttttatgtattttatattatttattattgggtgtgatatatatatatatataattttatattgttttatgtattttatattatttattattaggatatgatatatgaatatatatataatattatatagttttatgtattttatattatttattattggggtgtgatataaatatatatatatataattttatattattttatgtattttatattatttattattggggtatgatatacgaatatatatataattttatatagttttatgtattttatattttattattggggtgtgatatatatatatatatatatatatataattttatattattttatgtattttatattattcgttattgtggtatgatatatatatatatatagaattttatattgttttatttattttatattatttattattgtggtatgatatatatatatatatatatatatatatatagaattttatattgttttatgtattttatattatttattattggggtatgatatacgtatatatatataattttatatagttttatgtagtttatattatttattattgtggtatgatatatatatatatatatatatatatatatatatatataattttatatcgttttatgtattttatattatttattattggggtatgatatacgaatatatatataatcgtatatcgttttatgtacgttatattatttattattggggtatgatatacgaatatatatataatttcgtagtaaattgttatagattaaattgtggtttgaggtaatttgagatttttttataggaaaggttttaggtagtagtttggttgggatagtgataaaattgtaaatgtatagtaaatgtattgtttttatgttgatagtaatgttgagtggttttagaggggaattgatgtagtagttaggtttggttatgtcgtatgttttattatttaaaatagtaatgtagtatgggatttagaagtttggaggttaatgaaggttaaaaaaaaaaaaaaaaaaaagtatagtggaaagagtttttttttgttttaaagttaagttttgttattgttattttgaacgtgttatttagatgttttaagttttagtatttttatgtgtaatatgaggaagtcggataagatgagtattattagaatttagatgtttaaaaatattttttgttgtttttttgagacggagttttgtattgtcgtttcggatagagtgtagtggtgtgattttcgtttattgtaattttcgtttttcgggtttaagcgatttttttgtttcgattttttaaggagttgggattataagtattcgttattatatttgtttaatttttttttaatgtatttttagtagagatagggttttattatgttggttaggttggttttgaatttttgattttatgattcgtttattttagttttttaaagtgttgggattataggtatgagttattgtgtttggttttaaaaatattttaaaaatatttatagatttgatgaaattttaatagaagagagtttatgagaaataatagttgttatagatttaaggggaataagtttattgtatatattaagaaatattaaatatatatatatatatgtatattaaatattgaatagtattgtagatgtgtatagaaatgaaaaagtaagaagataaaataaagatttatagtataaaatagatggtatagtataatataatttgttgatgttttgtattttaaagtataggttagatattatttgtgtgggttaggaagtttttatgtgattttttgttatttttgggtatgatatattattttttaaaaagattgttttataataataatgatagttatattaatgtgtttagtttttttttatatatattaaaaatgtattttaaaataaaaatattggtggtataaattatttaataaatatttgttgaatgaatgaagaaatgaattttgtttttagttttgttatagtgtttatttagggtagaatttagaagtagggtaatgagaagtaagaaggaagtagagggtttgaattatttttttagtggaaattggtataattatattttaatataatgattgttaattagaattatttttggttatgttggtggtgtatggatattaaaagaaagttttttttttttgttttagg

SEQ ID NO: 134 - DNA, 15951 bp, Artificial Sequence
  chemically treated genomic DNA (Homo sapiens)
tttgaaataagaagagaaaatttttttttagtatttatatattattaatatggttaaaaataattttagttaataattattatgttgaagtataattgtgttaatttttattggaagagtggtttaagttttttgttttttttttgttttttattgttttgtttttaagttttattttggatggatattgtagtaaggttggggatagagtttatttttttatttatttaataaatgtttattgagtagtttgtgttattaatgtttttattttaagatatatttttaatgtgtatggaagaaagttaaatatattaatatggttgttattattattataaaataatttttttaagaagtggtatgttatatttaagaataatagaaagttatatgagaattttttgatttatataaataatgtttaatttatattttgaggtgtagagtattaataaattgtgttatgttatgttatttattttgtattatggatttttgttttatttttttgtttttttatttttgtatatatttataatattatttaatgtttaatatatatatgtatgtatatatttaatattttttaatatatgtagtaaatttgttttttttggatttatagtaattattattttttatgaatttttttttgttgggattttattaaatttatgaatatttttaaaatgtttttggggttaggtatagtggtttatgtttgtaattttagtattttgggaggttgaggtgggcggattatgaggttaggaatttaagattagtttggttaatatagtgaaattttgtttttattaaaagtatattaaaaaaaaattagataggtgtggtggcgggtgtttgtaattttagttttttgggaggtcgaggtaggagaatcgtttgaattcgggaggcggaggttgtagtgagcggagattatattattgtattttattcggggcgatagtgtaagatttcgttttaaaaaaataataaaaaatgtttttgggtatttaagttttagtgatgtttattttgttcgatttttttatgttgtatatgaaaatattgaagtttggggtatttaaataatacgtttagaatgatagtagtagagtttgattttgaaataagaaagagttttttttattgtatttttttttttttttttttttaatttttattaatttttaggtttttaaattttatgttgtattgttgttttggatgataaagtatgcgatatgattaagtttagttgttatattagtttttttttaaagttatttaatattattattaatataaaaatagtgtatttgttatgtatttgtagttttgttattattttagttagattgttatttaaaattttttttgtaaagaaattttaaattgttttagattataatttggtttgtgataatttgttgcgaggttatgtgtgtgttcgtgtgttatgttttagtgatggatgatgtagcgtgtatgggacggtgtgcggttgtgtgtatgttcgtgtgttatgttttagtgatggatgatgtagggtgtatgggacggtgtggggttgtgtgtgtgtgtgtgtgtgtgtgtgtgtgtgtatgtgttatgttatagtgatggatgatgtaggttgtatgggattgtgtggagttgtgtatgtatgcgtgtgttatgttttagtgatggatgatgtagggtgtatgggatagtgtggggttttgtgtgtgtgtgtgtgtgtgtgtgtgtgtgttatgttatagtgatggataatgtagggtggatgggatagtgtggggttttgtgtgtatgtgtgtgttatgttatagtgacggatgatgtagggtgtatgggatggtgtggagttgtgtgtgtgtgtgtgtgtgtgtgtgttatattttagtgatgagatgtagggtgtatgggattgtgtggggttgtgtgtgtgttcgtgtgttatgttttagtgatggatgatgtagggtgtatgggatggtgtggagttgtgtgtgtgtgtgtttgtgttatattttagtgatggatgatgtagggtgtatgggattgtgtggtgttgtgtgtgtgtttatgtattatgttttggtgatggatgatgtagggtgtatgggatagtgtgggattgtgtgtatgtgtgtgttatatttagtgatggatgatgtagggtgtatgggatagtgtgaggttgtgtgtgtgtgtgtgtgtgtgtgtgtgtgtgtgttacgtttagtgatggattatgtagggtgtatgggatagtgtggggttgtgtatgtgttacgtttagtagggtgtatgggatagtgtggggttatgtgtgtgtatgtgtttatgtatttttgattatagtttgattagatattagggagaatttaatttaaattagttaatgtgttttagagagtagagttattttataagtttagaattttttatttgggagtttttgaattttgattttggtaagtaggtatattttgtgtttttataagttgttgatttttgtaggatttatgattaaatattgagagtattataacgttatgatttatagttgtttatttgtataaaatgtagagtgatcgataattttttggtgcgaatttaattttattgttttttttgaattgtgttgtgttataagttgttttttttattatattttaaaatgtattattttaaatgttgaagtggaattttttaaattaggataaggttgattttttaaggggtttataagtaaagagagtgttaattaaatttgtatttagatttttaatttttatatatatatttttttaaaaataatttgtttaaaatatattttttttttattttataagagaaaaattatattttttattaattttttatttattttagagttttgtttttggatataaatatattcgtatgttagagatgattcgaaatattggtataggtattaagaatttgaatattgtaaatgatattgtagtaaattcgtttttaagtttagtgatttttatttatttttttttattagttttgagggagtattcgattaagttgttaagtttgattaaattttgatagtaaattattatataatttggggtatataatttggaaggattttaaggaattgagatattgttataataaaatttttaattttatttatttatttatatgaatgaagttttttaatgtttaaatttttgaaaatgaaatatgggaataatattgatgttaaatttgtttaattttgttgataagtaatatttatttatggatatatgaataaatgagggaaagttttttttgttttagagatgaatttttaatagtaatttaaatataaaggtttaagttatttgttaaaatttgtagtatatttattttatttaattgtgtattgaaagtagttgttatgttaatttaatagaaaagaaaaatattttaatatatagagatttatagttgtagaaaattgaaattttatatttttattttgtaaagaagtataataattaagaaaatattttaagtttaaaatgtgtaattttaggttaaatattgtagaagtgggatagaaataattatttaaggagagaaaaatgaataatataaaattttttaagagtttgtttgtggttttttaagtgatgaggattgtagattatgttagtattttattttattggataaattttaagaaattatgtaataattttatttttatagtttaatttttgtaatatattggaaaatttaatttttttttgtttttaaaatttgggataaaaaattgtagttttttatttagaaaggtgtaagaggtaatatagtgttttaggatatttttggaggtataggagtaaaaatattgttgttgaagagtataattttgtagtttttatgaaggggatttgagtgtttgtttttgaatttgggttttgttttatttagatagattgtagaaggagtgtaacgattttaaatttagtggtattttttttgtggaagtggttttttttttgaatagagtatttttagggatttttttggttttggggttagtttataagagtgtgtagggcgaaggagtcggtgaggtttttagttttttattatagtggttaattttatttattgttttttgttttgatttgtttgtttaaatttttaaataagatttggtttaaataaaatttttaaaaagagatgttttttattttaatttgtttgtttgtttgtttgaattttttttaagtaaaattttattagtaaattttttattatataagataaaataaagtgagagagagcgagataatttgttttaaatatttgaaggttttagaggattggtatagtgtttttgatgaaggtataatatttaagaaaggaaaatgtaagttagtgtgtattttttgttttaatttgacgtatttttttgtttttatgtattattaaatattaagatttattttttataggttattttagagttataggagaatataaaggttatttttaagttaatttagtatttatttgttgttttgtaggaagttttttagatttcgaatgtttaagatggggtagttattattttttattattgagatttagtgagcgtaaatgatttgtttaagtttgtttatatgaatgtgtatagggttaatatagttatttttatttttttagggtttatgaattttgaaaatttgataaaagtcgtggttagatttttttaaaataaatgtatgtttgtagtagtttagagaattttagatggtttatgatttattaagtttgtttatgtttaatgtggtttaagtttaagattttgtgttaattgtaaggtaattgatagggattttgtgtggaggtatggagaatggatgatgtttaaaaattttttttgagtaatagtttttttttgaaatttgtttggggtgggtaggtttttttatatttgtttttattttgtattatagtttgtaggatgttgttttgttttgtgttattaagtaagttaaatattaaaataagaggaaatttttttttagaagtatttatatgttttgttagtttttaatgttttttggaaggttggtttaattggaagttgttggaaaggagttagagattgggttattagaataatattttgtgtttgtgtaagtttttattaagtattatgattatttttaattttattttaataaagaattgggttggtgtagtggtttatgtttttaattttagtattttgggaggttaaggtgggtagattatttgaggttaggagttcgagaatagtttggtaatatggtaaaatttcgtttttattaaaaatgtaaaaattagttaggtatagtggtatatgtttgtagttttagttatttgggaggttgaggtaggagaatcgtttgaatttagaaggtagaggtggtagtgagtcgagatattttagttttggtaatagagtgagatttttttttaaaaaataaaataaataaataagtaaaaaaattaataatgattgtagggtgaagagaaaagtagagagaaagtggaagaagtaaatgttttgatttaattttttatataaggaggtattagaggttagtaggtgttttatggtttgttacgttttaggtggtttataaagttggtaagaatagtgttatagaaaggagattttgttttttttgtttatattgtagattatagttttgtgtttttagaaaggcggaattaaataatgttttttttttgattttttgtttttttgtttatatttgtttgtttttttttttttttttatagttaaatttttttaatttttttgttttttttttattttttagtttattgttcgattattttattaaagtgtttttgtaaattttattgttgatatttttattattaaattaaatgaagattttttatttttattttttttgatttttttgtagtagtaaatattattatttttttttgtttaaaatgttttttttagtttttttgttgtttttttgttttaatgtttgagaaatttttttgagtttttttttgaatttattttaattttttgtttttttttgtagaggtaagtgtttttttaggtttttatttttatggttttattttttttttatttttttgtttttttgggaagtaaagatgatttttttatggttatttgtttttaatgttttttaattagtattttcgtttttgaatatttttttgagtaggaggtttataatttaaatgcgtaataaatatgtgagtatatagttgaggaagttattgatagaggttttttaagggtaaggattattatttatttaggtttgaatttttagttatggtagggtatatatttaatatttaataaatattttatggataaatatatgaatgaataatggtagaggaataattgaaagtaagataaaaatatgttaaataagaaaatgttggaaaaatatataataattataattgaatgtattatttttatagtagtgataatagttaagtgaataaataaaatggtgaaaatagatataattttagtttttatagaatgtatattttattggtagagaagataatgaaataaatattaataattatataatagtattaaataagtaaatatgaaaaatattaatagaatatagttataagtgttaggtaggaaatgaaatttatgtgatagaatgattgtgttattatgttggttaggaacgttagggaagatttttttaatgagataatgtttaagtggagagaagaatgattgtaagaaattagttagtgagaagtaggaagaagagtattaaaggaagaagaaaaagttattttaaaggttttaaggtggaagtaaattgtagtgtgtttaaagaatatgaagatattagtgtggttagaatggaatgagtaatggagagaaaaatacgagtcgggggtagtgatagattatatcgggttttgggatttaaaataaggggatgagattttattttaagtgtaatgataagttaacggaagttgggtacggtggtttatatttgtaattttaatattttatgaggttaaggtaggtagattttttgaggttagaagtttaagattagttttgttaatatggcgaaattaattttattaaaaaatataaaaattagttgggtatggtggcgtatgtttgtaattttagttatttagaaggttgagataggagaatcgtttgaatttaggagatagaggttgtagtgagttgagatggtattattgtattttagtttgttgaagattgggagattttagaggttaattgaaaaggtagtttgagattatattttgtgggttataaatattagttggtagaagggatatttttgaatagagaagtattatgaatatatgtatttaatggtggtatgattttttttgtggggttgggggatagggttttgttttgttgtttaggttgaagtgtagtggtatgatttgggtttattgaaatttttattttttggttttaagtgatttttttattttagttttttgagtaattgggattataggtatgtattattatattcggttaattttttgtagagataagtttttattatattgtttaggttggtttggagtttttgggtttaagtaatattttttttttggtttttaaaaatgttgatattataggggtgagagtagtgcgatatttttttttttttaaatgagttataattagggagattgtattgtaaaagaagaggttattgtaatggttttagtgagagttaaagagggataggtttggtttggtattagtgggaatgtaaataggggaggtgaatatgagagttgttgaggatgtagaattatataatttgttggtagtaaagtttagatgttataagttattatagttaatatattagtttttttatgtttttggacggtggtggtgttagtggtgtggtatagatattggtagtttagtttaggggtggaaaaagaaatatagtgagaaaagaggttgtttttaagttaaagagtaaattatgaatatagataagaagggatttaggatattaatatttagaatttaagtatatatttaatttagattattaattgttattattttgagtaaaatattagtattaaaaataaagtacgatatttaaaattttttaaaaagtttattggattagagatgagttatatttttataaatagtgaggatttgttttgtatttgattttatgaagtttttgatttattttttaattaaaaagattagatattttgaagataatataatgaatgttatttataaaattattgtgtgtttattttttaggtttaggtttagggttttttttaaatatagttttttatgtagtaagttattttgatttttgaggatttgattaataagtttttatttaaagatttttgaagatgtatattttaagagttggtggttagtttaggagagtttgaattattttagttgtattttgaaaaataggtaatgaaaagaagagtaaggattggaagttatataaggtggttaaaaggtataaatggacgaaaatttagatttgttttttagtttattaaaattttttttttgttttgtttttgagataagttttgttttgttatttaggttggagtttagtggtgtgattttaatttattgttatttttattttttgggtttaagagtttgttttgttttagttttttgagtagttgggattataggtatatgttaatatgtttagttagtttttgtaagtttagtaaatatggtgttttattatgttggttaggttgtttttgaattttcgattttaagtgatttatgcgtttcggttttttaaagtgttgggattataggtatgagttattgagttcggttatagttcgttaaaattttgataaatattagtgtaatttaattataagtttttaattaagagttatttttttgagatttatttgattgaaaatattttattagaaaaattttatttttatttttttaggttttaaaagttaattaaagttattttttgaatttgaagtaaaatttatataggtagtttgaggtttttgaatttttggggttaaatgtgtttagaggaaaaggaagaggttttgtttttgaaatattaaaaattattttagggttggggttttagtatttcgttgtagagtttaagtttaattttagggtattaagagaggggtttttgaatataaagtttaggaggtaatcgagaagggtttttattttgggatttatatggaggtttgggaattttttgtggttgtttttaaaggttggtgtttatgtcgatgtttttgtttttatttgggaaagataagttgtaatttttattaaaattttaaagaattttttgatttaataagtttatatttttgaaatagaggaggatgttaaggagagtagaaggaagagaggaataattgtttatttaagttaattaatttagaagtatgatatgtaaaaagataggataaaagtaatttatatttttaggttattgtggtttaaatttaagataggtttaaattttttttttttttttttattatatttttatttttgttttttttaatatagaaatttatattataagtatttgaaaagtgtgttatagtaaagtaaagtagtaggatgaattaggtgtatgcggtatttttttttggagttttatagaaaggtgtttaaaaatagagatttgtttggtttttttatagttatagattgtaggatttcggattttgggattatgtgggatatttttggaaagtttgaggaaaattggaagtagtttaattatgtgtattttatttaggtgtatataatattgttgagtttaaaatgtttagttatttttggattttttttgaattagaagtagtttaattacgtgtattttatttatgagtatataatattgttgagtttaaaatgtttagttatttttggattttttttgaattttaaattttattatttttaagaattttttttttattgtaataataatggttaatatttattaattatttattatgtgttaggtttagatttggatgttttttagtaaaattttatttaatttttatgatgaaattatagagtattattattatatttattttatagaagaagaaattgagttattaataagattgagttttagggtagaaaaggaaattatgtggatattttagattagttttagaagatttataggtttatagaaagaaatgggagggatggggatgagaaattatttaattgtaagtttgttttagggtatttatttagttttttatttattttattatttattttagagagaagtatagttttggaaaatggggtgataggtttattatgatttatttttagagagtttttataaattttagtaggaggaatagtagttgcggagttagaggataggttttagattttaatattatgtagtttaatagtgaagtttagataaaatatagtttttgtaaattacgatggttttatttgtaaaatagaaatagtaattttaatttataagggtgttgggagggttaaagtggatagtaagtttaaaagtatttataaaatttaataggtaatttaatataaaattttatggttatcgttgttttttattttttgaatttttatttgtttgattttattttatattattttaatttattttaattattttttatgtagaaaaaaataaatttattattttttttgtgattttgttggttttttgttttttgtttaatttagattgtttatagttttattgtttttttttagtgttaggttgtttagaaaaataattttttatttatattttagaaatttattatagttttttttatgaagttagaatgttgataatgtaagagtaatgttggtagtttagaaatagtggttgttaagaggtaaggggttatttttttttatggaagatggtttggaggtaggcgtaaggtgaattatttttggatattttaggttgagtaatgtgggaatagtatatatataaaggtttttttggattatgatataagttttaatttaaagtagtatatttggaaaatatgttttgaattaattataatgtgattttttagtgtttattttttagtaattatgatatgttagtgaatgtttattatttcggtagttttttgagggaaagaagtaaaattagtagtataaaaaaaaatagagagaaatggaaaaagttattaatagttttttggcgtttgggaaattttattggtaagttttaaaatgacgtattaaatagatataggttatgtgaaaggaattttgttttttatattagaaataaaaaggtatataaatagatatttttttatttttttttttttatgggatgtgtaggattaaaaagttgttggtatagtggttaagattttagttgtgttgttaaattgttcgagatttattttggttttttttttggttatttattgggtaaattatttaagttttttatgtttttgtttttttaattgtaaaatagaataatagaatttgttttatcgggttgttgtaggatgaaatgagttaatatgtatagagtgattgaaatgatatttggtttataattgatgtttaataaatgttagtgattattattattttttagattgattttagatagtaaaattaagtattaagtatttagttttaagttagaaagttataatttttatttatatttttggaattttattgtatagtagtaggtattattttttatttattttatgatggttatagtttgtaaataggtattttatggataaatttaaaatggaatgaagtagaaatattggaagaaagtttaaaggtaaagatgaattagggtatataaggttgtatttgtacgttggaatttgggattaagaagaaaaaattaattatatagtagaagtagaaaagatggtgaaggaaatgttgttgaaggaatgattgtaggggaataagggaaatttagagagaggaaaaaatgaggaattttttggtagtatgatgtagtttagagtttagattttagagttagattgtttggttttattatttattagttgtgttgggcgttattaatttttttataatttagtttttttagtgatgtggtttggttgtgtttttatttaaattttatttggaattgtagtttttataatttttataggttgtgggaggtatttggtagattattgaattatgggggtggttttttttatattgtttttatggtagtgaataagtcgtatgagagttgatggttttataaggggaaattttttttgtttggtttttattttttttttttttttgttgttatgtaagacgtgttttttgttttttattatgattgtgaggattttttatttacgtggaattgtgagtttattaaatttttttttttttaataagttatttagtttcgggtatgtttttattagtattatgagaatagaataatatatttagtaatgtgaataataaggataataattattaaatatatagatatgtaaggattattaaatgaatttaatgtgtttggaataatatttattacgttgttaagtgtaagtttaagtgttggttattattttataagatttgtttttatgtttttttgtttttatttttatttattagtttttttttttggtattgttttatgttagaaaaaatatatatagttttagatggggatgaggaagtgtggtatgtagattagtaggttttttttttgagatagggttttattttgcggtttaggttggagtgtagtggtatgattattgtttgttttagttttgattttttgggtttaagtaatttttttattttagttttttgagtagttgggattatagatgtgtgttattattattggttaattaaaaaaaaaaatttttagagatagggtttttttatattttttaggttggttttgaatttttgggtttaagtgatttttttattttagttttttaaaatgttgggattataggtatgagttattatgtttagtttggtagttttttatttataataagtttgatattaataagtttaattgattatatgtttttaagtttgatattgttaaattttagtgaatataaggaaagtataaaaagatttttatgtaggtgatattagtaagatggtggagtaggagatgttagttttatgttttaataaaaaaataaatatagatagttatatataaattaaaatagtttttataagggtggggagttgggggatggggtttaagagtttgttaaagaatttggaataatataatggagaaaagaaagaatatttatgtagaagaattatcggtgagattggtatatatgagatattaggagatagttacgaataaagaaatttgtaggttatttgtgttagttatgtgatatagagttattgaggtttttagtgttttgttttatagaggatattggtattttttatttaatagttatttttatagtaggatgttaaaaagggaaatatagttgtattattttttatatttttttattaagaagtagttattgttgtattgttttaggattggggttagggttattattttttataagtttatgtgtgtttttgatttttaaaagttgtggttgttttatagatatttatattttggattgtggttttgtggttgtagtgtatttttttatgttttagatattggagttattgttgttgtgaattagattttattttgggattttaagttaagttttttttgtgaaagtttttgttttagatattagtttagttattgtagaaaggtaatttatatttttaattttagagttgttgtagtaatgtgtatatttgcgttttagattttgtttttgaggttgtattatatatatttatatttttaatattagagttattattatagtgagttagtgaatattttgggttttagagttaaggtttttttgtgtttgtttatgttttagttattagtttagttattaaggagagttagtttatattttggattttggagttattgtagttttgcgtatgtatgtagtaaagtttttggttttttagttgttttataagtatttgtattttatatattattattaatgtgatagtaagtatgtttgtgttttgggtattggtattattgttataattgaatttggtgttgtggtttttttatgtatgtttatgttttaggttttggtttttggttattttatgggtattgtttattagatattagtgttattattattaggagtaggtttgtaagttagatttaattttaagagggatgtttttagttatgattttttaggtggggaaaaaaagagatatggaggatttgttataattgaaaattttaatagttttattgttattgtagatatttatagtgttggtttttaaggatttttgtagtatttattaatattaattttagttgatagatttgtatggagattatatagttttgtttttattgaagttagaatttttgtattttatttagttagtattttcgtattattttatataagaaggtatttttttattaaagttagtttatatagtttgaaattggggtagatttattagatgtttagatagtagtgtaaggtagtaagaaatatgaaaatttaaattaaaatattattatttaagaaatataataattttttagtagttgatttaaaagaaatggagtattataaatggtttgataatggatttaagataattgtttttaaagaagtttagttattttgaagtaaatatagagaaataatttggtgaaattagagaaataataaatgtataatataagaaatgtaatagaaagattgaaattataaaagaaattggagttgaaaaatataatgaatgaagtgagaaatgtagtagaaattattagtagtagatttgattaagtagaagaaagaatttgtgaattgaagataggtttttgaaaatatatagtgagaggagaaaaaagaatgaaaagaaatgatgaaagtttataagatttatgggatagtattaagagagttaatatttagttagatttagtggtttatgttataattttagcgttttgggaggttaaggtgagtggattatttgaggttaggagttaagattagtttgattaatatggtgaaatttagtttttattaaaaatataaaaaaattagttagggattgtggtatatgtttgtaattttagttattggggagattgaggtagtagaatttttttaatttagaaggtaaaggttgtagtgagttgagattatgttattgtattttagtttgggtgatagagtgagattgtattttaaaaaataaaaataaaaattaaattaaaaattaaaaaagagagttaatgtttatattatagtagtttaagaaggagaaaatagaggaaaagggggttagaaagtatatttaaagattgttagttgaaaattttttaaatttgaaataaaatattaatatttaggtataggaagtttaaaaatttttagttaggtttaatttaaaaaagattatattaagatataataattaaattattaaaaattaaagataaagataggattttaaaattagtaagagaaaagaagtatattatagataagaattgtaataaggttattataagattttttagtagaatgtttttaggtttagagagagtgagatgatatatttaaagtgttgaaagagaaaaaattgttaattaa

SEQ ID NO: 135 - DNA, 6129 bp, Artificial Sequence
  chemically treated genomic DNA (Homo sapiens)
agattattacgtggggaggagatagaagtgaaaggtttattttaatgtaagggtgattagttttttttttagtagtattgatttattttggtttattaattaatgtgaattttttataataggcgattttttttgagtttaggaggatagagttgatgatagtgtagtttgaaatttttggggttttggattgaagttgtggttttgttatttttttagtaattttgagttgttattgggtaatagattttttaggttgtggaggaggttgggttaattggggattttaaatgtttgagtcgtgtgttgatttattaattatgtttattttaggttgaattggtgttgtttttttttttttaggaaaggtttggttttttttattttgtttaaggaaattttttgtgaatttttatatttttttaaattattttgatgtttattggtttggatttattatattagaagttattgagggtaatattaggtatttatattttaaaaatgttttttaggtgatattaatgtttaggtaagatagagtaataatgttttaagtggttttttttatttatattatttatttttatggttgtgagattaggggtgggagggtaggggagggttatattaagggttttgaagtttttaggatagatttgaataattttttttttttttatgttttttttttttttttttttgtagggggtttatttggttttggacgggttttagtaatgacgttagtttgttaagacgagcgaggtaaatagttgttgttttggtgattttaaggagaggtagttgtattttagtgattttggtaattagaaaatgttaaggaatattggtttagatttttttttgtttagattgataatacgaaaattacgacggatatggttggaaagaacggtcgtttggcgcgatttttagttttggaatttttggaggatatgatatttaagaagatattagtagatattgtttttattaaagatagagttaaagtggagtttgaataattagatttacgttagtaggattttagaggaaatttttattttcggtattttagtagaaatcgtttttgttttgttgttatttggtttttttttgtaatttagtatgtgagaatttcgggtagtttgattttttgtttatttttgatagttttgttgttgtgtttcgggggaggtaggtttttaatataattgttattttgtttttgtttggtgagtgttgagatggagaggtaggttggtatttgtttgatttgatattttagaaaaatcgtaattttatattgttttttttttgatttttaaatatatgaaattagatttttttggagaaatatagagtgttttaattttgtttagttaggggttgttgggggtggtttttttaagtatttttttgtgtttagttaattagtagaatttgatttttgggaggtgaattagttagggttttttagagggataaaattaataggatagatgtatttataaaggggagtttattaaggagtattgatttatacggttatggaattatgtgaggttttatatagtttatttgtaggttgaggagtaggaaagttagttcgagttttatagttgaagaatttggagtttgatgttcgagggtaggaagtatttagtataggagaaagatgtaggttggaaggttaaggaagtttagtttatttatatttttttgtttgttttttattttggttataatggtagtagattagatggtgtttatttagattaagggtgggtttgttttttttagtttattgatttaaatgttaattttttttggtaatatttttatagatacgtttaggattaatattttgtattttttaatttaattaagttgatatttcgtattagttattataggggtatgttaagtaagaattgtgtttatggttgtaattataaagttacgattattggagtaagttttataaattagagttttttgtttagggtttttagagatttattagatatttgagtatttcgaaaagttagatgggagaagtacgtttattacggtaaatttgcgtagttaagaaaattaagtttttttgttttatgttaaatttttattaattgattgtggtagtcgtggtaattttatgttatttagaatttttgattggtaatagtatttttgtttatttgataataaataatttaaattttaaattaaagttagtcgataatattttttaaaattttggaatcgtgtcgggggaaataaaatataagagatatgatttgatgtgaaagaatttaggattttttggttttgattaaattagggtgtgtttttgttgttttattgggattgtgaaatgttgggatgaggagatatgaaaaatttatagttgaatattttgttgatggttttaaattatagaaataaatatttaggaagtttttattgagtagttttatagggtaatgttagttgttagagtaaataaatttacgttttaattattttggtttagaagtgatgtatgttatttttgtttatatttttttgttaataattagtaaaatgattttatttatatgttgtgtgtgtttgtgtgtgtgtaaaatgtaatttttttttggatagtaatttatagtaataattatatggtagaaggagtaaattttttgtggggtagttagttatttttgatatgaggaaagagaaagaagggttagtattaagtggtagtttaggtggtatatattaagaatttaagtttttagagaaatgggagttttttatgggagagggtttttggtagttaggatatatggagtttttttcggaggtattatgttattttttgggggtaatagggtgttaagtattttaagtttaagaatagaaagtttgggttttaaggtttagatgagggtgaggtttgtgtattaaagattaaggagatgaagattagggtagagtaaataggtgttattagaaggttaatatagtgattagtaattgtagttggtgtgataaagtagagaggttcgtagtagtttttggaagggtttgagtagagggatataggatgaagagtattattagtttgttggttagaataatttggttagtcgggtatggtggtttatgtttgtaattttagtattttgataggttgaggcgggtggattacgaggttaggaatttaagattagtttggttaagatggtgaaattacgtttttattaaaaatataaaaattagtcgggcgtggtggcgggtgtttgtaattttagttattcgggaggttgaggtagagaattgtttgaatttgggaggtggaggttgtagtgagtcgagattgtattgttttattttagtttggtaatagagcgagattttgttttaaaaataaataaataaataaaaaataaaatatatcgtggttttattatttatagtgatattttgagtaaatgatttaaattttttgagttttaatttttttatttaaaaaagaggattgttaatattttattttatagggtggtggtaagaattaaatttggtaatatttataagatttgttgtttattatagttgatttttaaggtagtattcggtgatgtttttgaaatatatatcggtaaagttttaattagatgaaagttaaaatttttatatttgtgtaaggcgttatattatttggttgtttttgtgtaggtattttgttgttttttttatttgtaattttttttttttagaaatttgtatggtagttttttttatttttgttaatagaaaaattaaattttgtaaaatatttttaagaagtttattttgaggtaatatgagttattgtagtttagagaaaatataaatttaagaagttttgagtgagtggttttgaggtagttgggttatagtttggttttatatattttagggagataggtattataggtaaggatatttggaaattagtatatggaaggtaattggtagttttgtttaaaaaatgtgagatattttaaagtgggggagggtgcggtgttaggatatatgtattggtggtttttttttttgtttttttttgagatggagtttcgttttgttatttaggttggagtgtaatggcgtgatttttgtttattgagtttttgttttttgggtttaagtgatttttttgttttagttttttgagtagttgggattataggagtatgttattacgttcggttaatttttgtatttttagtagagatgggattttattatgttggttaggatggtttcgattttttgatttcgtgatttatttgttttggttttttaaagtgttgggaatataggcgtgagttattatgtttggattatgtgttggtttttatgtatgttttttggcgtatagttttatagtttttgttatagttttgttagaatgttgggttttttagattttagggataggttttaagaaatagttttttttttgtcgtttttttatttgttttaaggtaaggtttttatgttttttggtttgattgtgggttttataatttttttatgaggttaggtatagtggtttatgtttgtaattttagtattttgggaggtcgaggtgggtggattatttgaagttaggagttcgagattagtttgattaatatggtgaaatttcgtttttattaaaaatagaaaaattagtcgggtgtgatggtgggcgtttgtaattttagttattcgggaggttgaggtaggaagaattgtttgaattcgggaggtagaggttgtagtgaattaagattatgttattgtattttaatttgggcgatagagcgagattttgttttaaaaaaaaaaaaaaaaaaaaatttttttatgagaggtttttattttatgttttgggggaagaaatgttgacgttaaggaagtttttataaaaatttaagaggatagggttgggtgaattttttgatagtttaataggaggaggtttttgtagggcggtataattagggagggcgtggaagttttgtatttttttttttatattttgttttatatatttttttatttgtattttttgtagtatttttgatgataaattagtaaatgtaagtagggtgtttttttgagttttgtgagtcgttttagtaaattaattgaatttacggagaggggaattttaatggaagttggttggttagaaagaagttttggaggtttggatttgtgattggtggaggggggatgttttggatattaagtttttaatttgtaggatttgatattatttttaggtagatagtgttggaattgaattagaggatattaagttggtgtcgttgtttggtgttggggtgggatttttatatatatggttatataagttattttttgtgttgattgttgtggtgtgagagtagaggaaagatggttatagagagttttttttatatagggatttggggggtagagggttaggggagggttgaggggttttataagttttaagtgcgttttagggattttttagttaatagtagttgagagagttaagttattgtttagtgatttgaagttagtaggaaggaatgtttgagtaagataaggaggttgtgggggtttaggtttttggagttttatagatagtagttttttgggtgaatagatagtgattgtttttttttagatttttgggtgtttgatttttagttagaattttttttagatttgggaaaggtttagtaagggaagagatattaatatcgattttttggagatgtacgttttttttattaaagatggttttgtagtttaaaggttgtttggtagttttttttaaatatgttaaagaaatgtattttggggtaaaatattttaattttttttagagtttgttgtttgttatgtgatattatattagagttaggttggagagtaagttatattttattgggttaattaaaaaatttatttaatgagattgtattgtttttagggtatgatttaatttttgttttttatggttttaggtattgtgtatagtttggtattttattgttataaagggtttgtttggttagttttataatttttattttattttaatgt

SEQ ID NO: 136 - DNA, 6129 bp, Artificial Sequence
  chemically treated genomic DNA (Homo sapiens)
gtattaaggtaaaatagagattataagattgattaaatagattttttatgataataagatattaaattatatataatatttaaggttataaaaggtaaagattaagttatattttagaaataatatagttttattaaatgggttttttaattaatttagtaaaatgtggtttattttttaatttgattttggtatagtattatatgatagatagtagattttgaaggaaattaaaatattttgttttaaaatatatttttttgatatatttggaaaaggttgttagatagtttttggattgtaaagttatttttggtgggggaaacgtgtatttttagagaatcgatattaatgtttttttttttgttaggttttttttagatttaggagagattttaattgagagttagatatttaaaggtttgagaagagataattattatttatttatttagagggttgttatttatgaggttttaaggatttaggtttttataatttttttattttatttaggtatttttttttattgattttaagttattagataataatttgatttttttagttattgttagttaaagaatttttaaaacgtatttaagatttgtaaggttttttagtttttttttaattttttattttttaagtttttgtgtagggaaaattttttgtagttattttttttttgtttttatattataataattaatatagaagatgatttatgtgattatatgtgtgggggttttattttaatattaagtagcgatattagtttggtgttttttaatttagttttaatattatttatttggaaatagtgttagattttatagattgagggtttagtgtttaagatattttttttttattagttataagtttaggtttttagaatttttttttgattaattagtttttattggggttttttttttcgtgggtttaattaatttgttggagcggtttatagaatttagggaaatattttatttatatttattggtttattattaaggatgttgtagaggatatagatgaagagatgtgtagagtaaggtatgggagaagggatgtagagtttttacgttttttttggttgtgtcgttttataggaatttttttttattaagttattagaaagtttatttaattttgtttttttgggtttttatagaagtttttttgacgttagtatttttttttttagggtatagggtaggaattttttatgggaaggtttttttttttttttttttttgagatagagtttcgttttgtcgtttaggttggagtgtagtagtatgattttgatttattgtaatttttgtttttcgggtttaagtaattttttttgttttagtttttcgagtagttgggattataggcgtttattattatattcggttaatttttttatttttagtagagacggggttttattatgttggttaggttggtttcgaatttttgattttaggtgatttatttatttcggttttttaaagtgttgggattataggtatgaattattatgtttggttttatgggagggttgtaaggtttatagttaggttagaaaatataaaaattttgttttggggtaggtgaaaggacggtaggagagagattgttttttagggtttgtttttgaagtttaaaaagtttagtattttagtaagattgtagtaagggttatggggttatgcgttaggaaatatgtatggaaattaatatatagtttaggtatgatggtttacgtttgtatttttagtattttgggaggttaaggtaggtggattacgaggttaggagatcgagattattttggttaatatggtgaaattttatttttattaaaaatataaaaattagtcgggcgtggtggtatgtttttgtaattttagttatttaggaggttgaggtaggagaattatttgaatttaggaggtagaggtttagtgggtagagattacgttattgtattttagtttgggtgatagagcgagattttattttaaaaaaaaataaaaaaaaaaattattaatatatatattttaatatcgtatttttttttattttgagatgttttatattttttggatagaattattagttattttttatgtattgatttttagatatttttgtttgtaatgtttgtttttttaaaatgtataaaattagattatggtttaattgttttagggttatttatttaaggttttttgggtttgtgttttttttaagttatagtaatttatattgttttaggataaattttttgaaaatattttatagaatttggtttttttgttaatagagatgaaggaggttattatgtagatttttgagaaaagagggttgtaagtagagggaatagtaaaatatttatataggggtagttagataatgtggcgttttatataggtgtaggggttttggtttttatttgattaagattttgtcgatgtatgttttaaaggtattatcggatgttgttttaagaattaattgtaatgaatagtaggttttatagatgttattaaatttaatttttattattattttgtggggtggggtattaataatttttttttttaaataaagaaattgaaatttagagagtttaagttatttgtttaagatgttattgtaaatggtgaaattacggtgtgttttgttttttgtttgtttgtttgtttttgagatagagtttcgttttgttattaggttggagtgaagtagtgtaatttcggtttattgtaatttttattttttaggtttaagtaattttttgttttagtttttcgagtagttgggattataggtattcgttattacgttcggttaatttttgtatttttagtagagacgtggttttattattttggttaggttggttttgaatttttgatttcgtgatttattcgttttagtttgttaaagtgttgggattataggtataagttattatgttcggttgattagattattttaattaataaattggtagtgttttttattttatgtttttttatttaggtttttttaagggttattgcgagtttttttgttttattatattaattatagttgttaattattgtattgattttttggtgatatttatttattttgttttgatttttatttttttaatttttagtgtataaattttatttttatttggattttagaatttaaattttttgtttttagatttagagtgtttgatattttgttgtttttagagggtggtatagtgttttcgagaggggttttatgtgttttggttgttagaaatttttttttatgaaggatttttatttttttaagagtttggatttttaatgtgtgttatttgagttgttatttaatgttgatttttttttttttttttttatattagggatagttggttgttttataagaagtttgttttttttgttatatagttattgttgtaaattattgtttagagagggattgtattttatatatatataaatatatatagtatatagatgggattattttattagttattggtaaagaaatgtgagtaaaaataatatatattatttttgggttaagatggttaagacgtgagtttatttgttttagtagttagtattattttatagagttatttaatagagattttttgaatatttatttttatggtttaaaattattaatagaatatttagttatagattttttatatttttttattttaatattttataattttagtgaaataatagaagtatattttaatttaattaaagttaagaggttttaaatttttttatattaaattatattttttgtattttgtttttttcgatacgattttaagattttgaaagatgttgtcgattaattttaatttaaaatttgagttatttgttattaaatgaataaagatattgttgttaattagaggttttgaatggtatgagattgttacgattattatagttagttgataaaagtttagtataaaataaagaaatttgatttttttggttgcgtaggtttgtcgtggtgaacgtgttttttttatttggtttttcgagatatttaagtgtttggtggatttttggaggttttggataagggattttggtttgtggagtttattttaataatcgtaattttgtgattatagttatagatataatttttgtttagtatgtttttgtgatggttaatacggagtgttaatttgattggattgaaggatgtaaagtattgattttgggcgtgtttgtgagggtgttgttaaaggagattaatatttgagttagtgggttggggaaggtagatttatttttaatttgggtgggtattatttaatttgttgttattgtagttagaataaaaagtaggtagaagaatgtgaatagattagatttttttagttttttagtttatattttttttttgtgttggatgttttttgttttcgaatattagattttaagttttttagttgtgggattcggattggtttttttgttttttaatttgtagatggattatgtgggattttatatagttttatgatcgtgtgagttaatattttttaataaatttttttttataaatatatttattttattagttttgtttttttagagaattttggttaatttattttttaaaaattaggttttattggttggttagatatagaagggtgtttagaaaaattatttttaatagtttttaattaggtaaaattaaggtattttatgtttttttagaagaatttggttttatgtgtttagaaattaggaaaaaaataatgtaaaattacgatttttttggagtattagattaaatagatattagtttgtttttttattttagtatttattaggtaaaggtagagtagtagttatgttggaaatttgtttttttcgggatatagtagtagagttgttaaagatgggtaaggaattaggttgttcggaatttttatatgttaagttgtaaaggagaattaaatggtaataaaataggaacgatttttattgaaatatcgaagataaggattttttttgaaattttattaacgtgggtttgattatttaaattttattttaattttgtttttagtgaggataatgtttattaatgtttttttaaatattatgttttttaggaattttagggttggggatcgcgttaggcggtcgttttttttaattatgttcgtcgtggttttcgtgttattaatttgggtaggaggaagtttgagttagtgttttttgatattttttaattgttagaattattgaagtgtaattatttttttttaaagttattaaggtaataattgtttatttcgttcgttttaataaattgacgttattgttagaattcgtttaaggttaaatggattttttataaagaaaaaggggaagggaatatggaggagaaaaaggttgtttaagtttgttttgagagttttaaggtttttggtgtaatttttttttgtttttttatttttaattttatagttatgaaggtgagtggtgtaggtgaagggaattatttagaatattgttgttttattttatttgggtattaatattatttaggaagtatttttaaaatatagatgtttgatattatttttagtagtttttgatgtaatggatttagattaataaatattagaatagtttggaagaatgtaaaagtttatagagggtttttttgggtagaatgggagaggttaggttttttttgggaagggaagggtaatattagtttagtttagggtagatatagttaatgagttaatatacggtttaagtatttaaagtttttagttaatttagttttttttataatttaggaagtttgttgtttaataatagtttagagttattgaggaaatggtagggttatagttttaatttagggttttaggaattttaggttatattgttattaattttgtttttttggatttaaaggggatcgtttgttatgaagaatttatattgattagtaggttaaagtgagttagtattgttggagaaagagttaattatttttgtattgaggtgggttttttatttttgttttttttttacgtggtgattt

SEQ ID NO: 137 - DNA, 14551 bp, Artificial Sequence
  chemically treated genomic DNA (Homo sapiens)
tttagggtttgaatttaatttttgtattttttttggttttgagttattgagtaagttatttagtagtattatattttaatttgtaaaatggggataattatttttgttttttattgttattaagattaatgaagtaatattgtggaaattttaggtatttagggagtttaatagtaagattttttttttttttatttttttgagtatttatggtgatatttattaggaaaaaggaaagagttttgattagtgttaggatttttaagtttggtttagattttgttttataaatattattagtttttttgtagggttgttaggaggattaaataaggttgtgaatgtgaaggtttttgaaaatggttttgtaattataaggtattattatttgtatattttttgttgttggtttgttgatatttgtttttaatagtttaaggaagtagtttagtatattaaatgtattaattgtaaatttttggttagttatattgttttttaggttttgtattagttttttgtggttgttgtaaaaaattattataagtttgatgatttaaaataatagaaatttatttttttatcgttttgtaggtataaggtttaaaattaatatattggtaagatttgttttttttgaaagtttaaggggagaatttttttttgttttttttagcgtttggtggtttttggtgttcgttgaattgtggttgtatagttttagtttttgttttgtttttttatatggttattttttttgtgtttttgtgtgttttttttttattttttagaaagatgtattatttttattggatttggggattattttgatttatttagtataattttattttaatttttattttaattatatttgaaagattttgattttaaataagtttatattttgacgttttaggtgaagaagaatttgggggtagagaggattttatatagaatttattttagaattttagaatttttatttaaattatttttgatttttatttaatgtatgtttttatttagttttagattgtattaaataggaaaattttttatatagtgtttagtattagtttagttatttgtgtagaggggatttaggagattagagtggagaggttttatagcgagtttagagaaggtttaattttggaaatgagaggaagggtaaagtaaataagagaataagtgtttgtttttgagagaggaaggtttgatatgaatagatagtatgtattttaggagtcgtgtagtttgaggagagaatattagttttgaaattagatttggattattggttttttatttttataggatgttaatatttttatattatttagttattttaattgatattttatgaatacgtagatagtatgttatttattttattatttggatttttagttattgtaatagtggtgtgttggtaaatggttaagagttagatttttgaaaaataatatatgtatatatgtaaatgagtttgttataaattttgtttatacgaagaatgtgtaatacgtaatttataaaataaaatttattgtattttaataaaatgtataattttttttattgtaaattttatatagttatagattttataggttgtttgtttttatattggtttaatttatatttatagttaaattgtgtttataagtgataaaggaatgtagttttaatatgaatgttggttaatgttttttttgaagttaaagaaatgtgaaataataaaaatatatgttggaatattatttgtttattagtgatattagtgattttttgttgaattagatgatagtttttgaatattggaaaaatgtttttttaattttttatgttaattttaatgtaagggttatagttatggtatatgtttaagtttattttgtattattatgttttttttattatttttttatatttagataattaataaaatagtaaagttttgatttatattgtttgttgatttttatggtataaatttttattatggttagttttaagtttttaatattatgttattgaatgtagagtggggaagagaggtttagaagtattaatgttttagtatttaatttttattgtagatatataagagatgttaattattttaagaatatagatattagtaatgttataaaataattaagaaataatgagttttgagattttattttttttatttaatataatttatttagttgtgaagttttttttaaaggtagggttttgttttgttgtttaggttggagtgtagcggttatttataggtgtattagtttatttttatattgttataaagatattatttaagattgggtaatttataaaggaaaaaggtttaatcgatttgtagttttatatggttaaggaggttttaggaaatttataattatggtggaaggtaaaggagaagtaaggattttttttatattatagtaggagagagaagagtagttaagagtagaaaatattgttttataaaattatttaattttgtgagaatttatttattgttttaagatcggtatggaggggaaattgtttttatgatttaattattttttattttgttttttttttaatatttggggattatggggattataattcgagataaaatttgggtggggatatagcggtaaattatattaataggtatgattatgatagttcgtttttatattgttataaagatattatagttttaaatttttgggtttaaggggtttttatgttttagttttttaagtatttgggattataggtatgtattattatgtttagtttaattgtaagtttatataatttaatttaattttatatgtttaataatggttatgtttattaagtattttataagatttttgaaaatttattttttatttttattaaaaaaaattgtttgtagatatgaggttttattttatcgtttagattatttttaaatttttggttttaaaaatttttttatttaggtttttataaatggtggggttataggcgtgttattgtgtttatttagatttttgaaaatttaataattttatgagttggtatatgttgattcgagtatatattattgggaatagttgtgaggaggatagttgagtgttggggaaaggaaggaagaaaatagtgaggataaagtttatatattttattagtttttattatttgatttttatggggaggtttattagagagtgtttatgatttgttataatggattttaaaaatatttttttatttttttaagtttttttgtgagtattggttatatttttagtattttatttttatagtttaatttatgaaaaagggcgggattttttttttgttaatattagttttttttttttaatgaaaagttagatataaattttaaaataaaggtaatttttagaatataatatagttttaattaaattaaaatggtttttatttaaaagataggtaataataaatgttgataaggatgtggagaaaaagtatttttgtatattgttgttgggaatataagttagtataattattgtggagaatggtttgaaggttttttaaaaaattaaaaatagagttattatatgatttataattttattggtaggtatatatttaaaagaaaagaaattagtatattgaagagatatttgtatttttatgtttattatagtattatttataatagttaaggttggaagcgatttaagcgtttattatcgatgagtggataaagaaaatgtggtatatatatataatgaagtattatttagttaaaaaagaattagattttgttatttataatgatatggatggaattgaagattattatgttacgtgaaataagttaggtatagatagataaattttgtacgtttttatttgtttgtgagaggtaaaaattaaaataattgaatttgtgggtatagagagtagaaggatggttattagaggttgaagggtagtgggggttggggaagaagtggggatggttaatgggtataaaaaaatagaaagaatgaataagaattagtatttgataatataatagtgtgattatagttaataataatttaattgtatatttaaaaataaaaatataattgtattgtttgtaatataaaggataaatatttgaggtgatggatattttatttattttgtgtgattattatatattgtatgtttttattaatatattttatatattttatataaatatatgtatattttatatatatatatatatatatatatatatatatatatatatatatatatatatatatatatatatatatgtatatttattatgtatttatagacgttaaaaattagaggagaaaatatatatataataaggagattgagttggaaggatggagttttgggatagatttgttttatatttttgtttgggagggaatttatatatatgtaagaagataaattaggagtatgggttattaaattatattatattgtatttatcggggttatagggttttttttaagtgattcgtatatgttttttttatttttgtgtgatagtggtatttgtattagattgtatgttgaggtgttatttgaaattatgaaataaaatagaagtaagaggtttattagtttattaaaatgtagttatttaagtttagttgtgaattgttaaatttgaggagtgatttaatgaaatattttttttttgtaatttaagaagatttatcggagagaattgtttagagaatttgtaatattcggtttttggagatagttaaggaaagaagttggggcgtatgtttttgtttaaagtcgggttttggtcgaggtgattatatatttttttttttggtttttataggttaagtgtttggttttttgagaagtttgttttttgagaataaaaaagtgatttaaagttttatgggagatgagtaatttttaagatataagtagaaaaagttttagtgatataggaagcgggtttaggaatttgttggtttttgatatataaattagatagtttttgttgtatgatacgaagtttgtttttgtttggtatttgtgagtagttgttaggtttcggttaggattttttttttttttttattggttgatggattttaaggggtttttttttttgattttcgtgttgtttttttttttggtttttggggtaagttacggaataggtgagtgtttatttgtttgatggtttgagttttatgttagttgttaggaattagcgtattttcgtggatggagagaaggtgtagggttgggtattgtgtttggttatttttttttagggattggttgttagttttaattgttttttttaaagaggaaggaatattataagtttttgggtttttgggtttttaagatttagttttattaattttagtttttaaggaaatgaggggttttaagttaaaggttttagttatttttttgattagttttagggtgataggttttggtagaagttttgtttgagtggttggttttatatgggtattttttggtaaagatttagtttagagagattgagttggatggattgagttttgggagaagatttgttttatatttttgttttgggagggaatttgtgtatatgtaggttgataaattaggagtatgggttaatagaaagtattggttagagtgggaagagagagtagaagtgaaaattttaggtttttggttgagaattagtagtggttatagtgcggttatattggtgtgtatttttttggaagagaaggtttaagaaagtaagagggaagaagttgggatttttgaaggttagggttggttatagtatgtgggaaatgtaaattgggaatttttagagagtagttttagtaggaaggttagataagagttatttttggatttggattttgtttttgtttttttgtttattttttttttaaggtaggttattgttttttgtttagaagtattagggttatgagaaaaggtatttgagaaagaaaaagttaagtaagaagtggattttggattgtttgtgtgagtggggtgagaatttttttttgtttatttgtttagattgtgggaggtagtttggagtagaagaggtggtattacggatacggggggaaattttgaggtttagggtgttttaagtttggggtttttaagatcgtaaatttaatatggatttttttaggaaaagtatcgtgatatgttagggatgtgggggtgttgtataatggatgtgttttttattagatagttagacgaatagggtttgtttagtttatttttttttggaatttgtagatttatggttcgtattttttaaggtttaggggaggaagaattgagttcggggtttagaaaattaaatcgagttattttaagtggttatagggaaagttaagttttcgttgttgtaattaatttgtgattgtattatttttggagtattttttggtgattgtaaggtgtgatggagtgatggtgttgaattgtgaattggatttttttatttttgtgtttgttagttttttggttagtttggtttatagtattttaggtattgttgattaatagttcgttttattgaggttttggaagtcgtcggttagggagaagtaatttagttttataaggtaagtttatttaatcggaggttgtttattttattgtatgtttttttttttgaatttttataaaagttttttagtgtttttatttttaaatatatatttttttgtgaagttttaataaaatttagatagaaatgttttgtaaatggggtaggttagttatgatagatttgtttaagtaagaagtttgatttttgtaaaattggtatttatttttatttttatttttatttagtttaatttttaatttttagttagaattgtaaaaattaaaaagtttatatgttttttttttaagtaaagtgaattttttatttttttcgatgagatttgttttaatagattttattttttagagtagttttaggtttatagtaaagttgggtagaaagaatagagattttttatatgttttttgttttatatatatatagttttttttattattaatattttttattaggatggtatatttgttataattgatgattttatgttaatgagttttttttatttttttatgtagtttttttgtattttttttatatattttgggggaaggtgagggataagtgcgtgggttttagatttggtttaattttgcgtgtttagtggtttattttattttaagatgttaatttaggtatttttattttttaaaaatattaatattgtgatgtgatgttgttatttttattgttttttttattggattggaaattagagtattagggttaattggtttaatttatagatttgattttgaatgattttatttagtaattattaaggatatatgatgtggtagttattgtgtaagggtgtaaggtgtggggaaaataaaatgaataatagttattgtttagtatttgatattgtgtttgtattgagagtttgtttataaatatttgttgagtgaataatattggtatatattgtatatttgttatatattaggtattgttttaaatgttttatgtgtgttagttattttatttttatattaattttataagaaatgtatgtattattggtattattataattttataaatgaggaaaggggtatagagtagtttagtaatttttttgcgtttatatagttgtttgattttagaggttttaatgagtaaaattggataagtttatgtttgggaagtaggggtggagagaatgttaaaatttgtatttaggttttatggtaaaaattagaatgtgttatttataattgaaaaatatgagttgaattgaattggaataaattgaagtatagaaatgtttaaaaggtgagagattgataaaaattatagaagaacgtagagggtatataagaagtatttgatttggaatttggaaaatgaaaatttttttttattatgtaaatgtttatttaatttttttttgttaattagtttgtttattgattattatatttataaaatatgttatgtttatgaaattttaatagtatataagagtatttagtgaagattaattttttttttatattttatgttggaggtaattattgtgattagttttttgtgtgtttttttaaatgtataggttttcgtgtttgatagattagtacggtgattatagttaataataatttattgtatatattaaaataattggaagagaataatttaaatgtttttagtataaagaaaagagaaatatttaaggtgatatatattttaattaattcgatttgatttttatataatatgtgagtgtattagatagtatatgtgttttgaaaatatatatatttattatgtattaattttttaatatggtagagaagaaattagagataaagagggtggggaaataaaatttttttcgattttttagtgttttggtgaagagtattagttttgatatttttttatattataagaattaaatttgtagttatttgtataggtaattgttttgatttaaacgaataataaaatttttttcgagaggagtaaatggttatagtttgaataaggtttttaggtagagcgtttagggtgttatgaagtttggagttattatttttttaagtaggttagtataagtttgtgttattattatgtagtatgtaagaaggaatgagttttagaatttggagttaagttttaggatttgttataaaagttaagatatgtaacggattatttggtttttggagagatttatttatttattaaagtgttggaataaggagtagatttttaagacggggaggggggatagttgtttttttttttttttataggtagggaaaataatttgtttttgttttttatttatggagtgtttgtttatttatatagagtaattgattttgtttttattatattattttagggggaagtggggggttaaagtatttattatttattgtgagttatttaataagaaatttaattttaatttagtatattttatgtgtatatttgggataaagttaataaaaatgaatattaaaaatttagttttaaataaatgggttcgatgggtttgatttttatggaatttgagaaggagcgttttagaaggaggtataaatgtagaggtaaagggttttaagtgtttttggtaagttgtttgttgtatttgaaatttagggtttatatttaaggtatttttatgtttttagttggtaagtggggaaaagggtttttattatttttttttataatatattttttagggatattataaaggtaaattagagtatattttgtttttggagggaggagaatttggattttgtgttgttatttgtttattttttatttattttattttgttttattaatttatttgggtaataaggatttattgagtttttattatgttttaggtgggtgttagggatattgtagtgaataaaatagatatagtttttatttttggaagtttataagagtgggggattataggtattgaattagagttgaatacgtgatgaatgatatgaaggagtgcgtttattgtttattggaagtttgtgataggaaaatttaatttaagttaggagttaggaaagttttttttatgaaagagatgttaaaatggagattagaaagatggaagttgttagttaggtaaataaagagtggttatagtttttaaggttagggaacgtatatattaatagtttaagatagaaagatttagtagtgttaaataataaaaataggattttgattgatggggatatagtttaaaaagtaaatatagataagatgttttttttttttgagtttaaatttattaaaagaattgtggggtttgtaagttttgttttttttgtatttgaaagaatattgtagtaagatgttaaaagtatatatgaaagtgttagggttaggtaaaaaaatataatataataaaataaaaagagttattattaggtagaagtttattttgtgagagggttggttaaattttattattaataatttttgattaaattttataggtttatgtgaattatttatttttcgaagtagaattatttatgaaggaaagtgagttggtgttaatagttataaatgtttttttttagatttttttagtaaataagggttggttgaattatagatatattggaaaatatttatttagtaggatgttttaggagtagggacgttattcgaggggttttatgaattattttaaagtttttatttatttttttattttgtgtttatgtgagggtgattttaagtattttttttagattttaatatttatatatttaggtattgcgttattattttttatgtgggttgtggggtataagggtttttttttgatgaagttttggttttattttttatgattgagtgtgtataaaattatttagttttttttatttatttttttttttttttttttttttttttttttttatgttttttcgtttattttatttttttatttttttatttttttggttattttttattttttttatatttttttttttttttttttaattaattttaagttttgaaagtaattatggcgtaaagagtgtgtaaggttaggtggggaaggagtgtatgggagttattttggggagtggtggcgatgggttatggtttgaaaatgggattttttattttttttttttttttattaaagttggtttttaaaaattaatattacgttagtaatttttaattttgttttgaattttagatttttttaagagatggtatttatggatgtgtttttagaaaaatatgtatacgtttatttatataattttttatataaaagtttggaagtttatatttgtatatatggttttaaatttttttttatttttttatatatagaagtttaggtttaggatttaagaagttatttttttaggtattgtgtttataagttaggtatgtagttattaaaggggttatattatttagatagttaggtatttataagtgtggtggaagaaaatttaatatgttttttagtatattaatgtaaaaataattattattattataataattataatgttttttatgttattaagtagtaggggagagtattttgttttaagtttaatatattcgtaatattttaaaagataaatgtttaattgttttttttatttttttttaataattaagaattttaattattttaggttagattttagtttagatagatttttttttttttttttttaattattgaatttttagtttattattagttgagttttttattgagtaatatggggatttcggggtattttggtgataagaatatttgggttagtgtgtttaattttttaatagtttattttagttataagttagttgtgaaagagttttttttaggtagttgtattatttaagttgatggttttattttattttttgatttttttattagttagaataatttatgttttttttgagttatgggtttttttttttatgaatattagtttatggttaagtttagatatatatatatgtgtatgtatatatatatgtatgtgtgtgtgtatatatatatatgtgtgtgtgtgtgtgtatatatatatatatatatatatatatatatatatgataaatttaataatttaaataagaggttttggttaggtattatggtttttagtatttatttattgaatagatatttattaaatgttttttatatattaagtatatagtatttgtttgtaggttttggggttaaaatagtgaataaaatgaagtttttttttttgaggtttttgtattttagtgggagagataaaaataaaataaataaatatatagtataatataatgtagtgataagtgtagaaagaaatataaagttattttagatagatggttagaggaggttttttggaggagaaattgttttgagtagatatttaaaataaagtgaaagaatgagttatttaggtatggaagggaagaaattttttagagagaggaatagtaaaagtaaaagttttgagataggaatgtttttggtgggtttaagaaatagttaggagttagtgtggtcgtagtatagtgagtaaagaggagggtaggaaatggagttggaatagtgttacggattgggtatgtagggtttttgaagttatattaataatggattatggttttattttatcggtgttagaaagttatagaaatttaaaagtaggagagagataaaataggatatggtttttaaagatgattttatttattgtatgaatgtagggagattagttggaagaagacggtagtatttaggtttgggatgatggtggtggaaatgtaggaggtgaaaagggtttagatattagatatattttgaagttagagttaggaggatttgttgttaaaatgagtgtggagtatggttgggtatagtggtttatgtttgtaattttagtattttgggaggtcgaggcgggtagattatttgaggttaggagttcgaaattagtttggttaatatggtgaaatttcgtttttattaaaaatataaaaaattagtagtgtatggtggtaggtatttgtaattttagttatttaggagattgaggtaggggatttgtttgagttcgggaggtagaggttgtagtgagtcgagatcgtaatattgtattttagtttgggcgatagtataagattttattttatagaaaaaaaaaaattgagtttggagtatgcgagaaagaaaggaattaaggatgtttttagtgttttggtttgataaattggttgaattataatgtttgtagaaggtgttttggaattaagagtttgtttgttaagtttgaaatgttttttagatttttaagttttgttttgtgtaggtagttgggagtgtagtgaaggttttggttgggagatataattttgtagtattttagaaatatgttagattgtgtaattgggtgagaaattggatgagtgtggatgagaatgagaatttcgagtattgagatgttttagtatttagaagtttagaagagtagaaggtttttgttaagaaaattgagtagaggtaatttatataggataggagaaaaatcgggagagtatgttgttttttgagttaaatgatgatagcgtttgaaggagggatggatgaattatgttaagtatttttgagaaagtaagtaagataagaattttgatttggtttagtggagtagatagtgattttgataaaggtggttttagcgagtagtggggaagaatatttgtttatagtgggtttaaggaaaaatgggtttggaaatgggaaaagaaattataaatatatattaaagtattttgttgtaaaggaaaatagaaatggagaggtatttggggatggatttgggattaggggagatagttttaatataaggaaattataagtttatatgttgtgtattgatggaaataatttagtaaaaaaaaatttgataatgtgagggatagaggtaattgtcgaaataaagttttgaagtaggtgagtgtttcgtggaggaagaggttcgatttaagtgggaatgtagattatttatttaggtaggtaggttgatttagtggtggtaataagtggaagttttttttttgtgttttttattttatattttagtgaaataaaaagtaaagtcgttatatgagagaggagggggaaaggtaggttgtgggtttgaggagagaggaggtgtgaaataattagtagtaggaatttttatagtggtttgaaaggtttttggtatttttttttttaattttgttgttggtttagtttttttggaaaagagaaatatagtaatattttattgtcgatattattaattattttagggtgtttggagagagaggattttatagtttgaatattgggtttattattttttgattttatattttttagatttttttgttttttttatgatttgaaatgttttttgggtttatgagtttagaattatttttatttgttttttattttttattttgtatatttaatggtggaaaaaattttggtagaggaattagtagaattgaattttaattttgattttgttatttattagttagggaagttatttaatttttttgtgttttttagatgtttgaataataaatttgagttgataaagatttagtattttagttaatttatataattttattttaagtaatttgaagatttttattgatagttttgaagtattgagaatatagtggggatttttaaggtagtttttatagattacgaaggatttggtaattttagggatagttaaagaggaagagggagagtttttagtttgttttttttgatttgttgatacgatgttgtttaaaggttttaataataagggatttttttttttttttttttatagg

SEQ ID NO: 138 - DNA, 14551 bp, Artificial Sequence
  chemically treated genomic DNA (Homo sapiens)
tttgtgggagggaggagaagagagttttttattattaaggtttttagataatatcgtgttagtagattaggaaggatagattggaggttttttttttttttttttggttatttttggggttgttaagtttttcgtggtttataagaattgttttgaggatttttattatatttttaatattttaaaattgttaatagaaatttttaaattatttaggatagagttgtatagattaattagagtattgggtttttattaatttagatttattgtttaggtatttaaaaagtatagagaagttaaatggtttttttaattagtaagtggtagagttaggattagaatttagttttgttaatttttttattagggttttttttattattgaatatataggatgaaggatggagagtaaataaaagtgattttgagtttatgagtttaggaagtattttagattatgaggaaaatagaaaaatttgaggaatgtggagttaggaagtgataagtttagtgtttaaattgtggaattttttttttttaaatattttgagatagttaataatgtcgatagtgagatattattgtattttttttttttaaaaaagttgagttaataataaggttaaaaaaaaaaatattaagagttttttaaattattatgagggtttttgttgttgattattttatattttttttttttttaaatttataatttgtttttttttttttttttttatgtgacgattttgttttttgttttattgaagtataaaatagaaaatataaaaagagaatttttatttattattattattaaattaatttatttatttggatggatggtttatatttttatttaagtcgagtttttttttttacggagtatttatttattttaaggttttgtttcggtaattgtttttgttttttatattattaggtttttttttattaggttatttttattaatatataatatataaatttgtagtttttttatattaaaattattttttttgattttaggtttatttttagatatttttttatttttgtttttttttatagtaaagtgttttaatgtgtgtttatagtttttttttttatttttagatttatttttttttggatttattataaataggtgtttttttttattgttcgttggaattatttttgttaaggttattgtttattttattaagttaagttaaagtttttattttatttgtttttttaggggtatttgatatagtttatttattttttttttaaacgttgttattatttggtttagggaataatatattttttcggttttttttttattttatataggttgtttttgtttagtttttttggtaggagttttttgtttttttggatttttaaatattggagtattttagtattcggagtttttatttttatttatatttatttagttttttatttaattgtatagtttgatatatttttgggatgttatagggttatattttttaattaaaatttttattgtatttttaattgtttatataagataggatttggaggtttaaagggtattttaaatttagtaaataaatttttggttttagaatattttttgtaaatattataatttagttaatttgttaggttaaaatattggaaatatttttgatttttttttttttcgtatattttaaatttaatttttttttttttgtgagatggagttttgtgttgtcgtttaggttggagtgtaatgttgcgatttcggtttattgtaatttttgtttttcgggtttaagtaagttttttgttttagttttttgggtagttgggattataggtgtttgttattatgtattgttaattttttgtatttttagtaaagacggggttttattatgttggttaggttggtttcgaatttttgattttaagtgatttgttcgtttcggttttttaaagtgttgggattataggtatgagttattgtgtttagttatattttatatttattttaatagtaaatttttttggttttgattttaaaatatgtttggtatttgaattttttttattttttgtatttttattattattattttaggtttgggtattgtcgtttttttttagttgatttttttgtatttatataatagatggaattatttttaaaaattatgttttattttgttttttttttgtttttaaatttttgtggttttttagtatcgatagaataaaattatagtttattattgatatggttttaaaggttttgtatgtttagttcgtggtattgttttaattttattttttgtttttttttttgtttattgtgttacggttatattggtttttggttgttttttaaatttattaagaatatttttgttttagaatttttgtttttgttgtttttttttttgaagaatttttttttttttatatttgggtagtttatttttttattttattttaggtatttgtttaaaatagttttttttttaagaggttttttttgattatttatttaaaatagttttgtgtttttttttgtatttattattgtattatattatattgtatatttgtttgttttatttttgttttttttattagaatgtaaaagttttaagaggaagaattttattttgtttattattttgattttaagatttataaataggtgttatgtgtttagtatataggaggtatttaataaatatttgtttaatgaatgaatgttgaaaattataatatttgattaaagttttttatttaggttattaggtttgttatatatatatatatatatatatatatatatatatatatatatatatatatatatatatatatatatatatatatatatatatatatatatatatatatatatatatttgaatttaattataagttagtgtttataaaagaaggagtttatgatttaaagagagtatagattgttttagttgataagaaagttagagagtaaaatagaattattagtttaagtaatgtagttatttagaagagatttttttataattgatttgtggttaagatgagttattggaaaattggatatattggtttaaatatttttgttattaaaatatttcgaaatttttatgttgtttagtaaagggtttagttaatagtagattagagatttagtgattggggaagaagaaaaagaagtttatttgggttaaaatttggtttagagtgattgaaatttttaattgttgaggaaaagtgagaaaggtaattaggtatttgttttttaaaatattgcgaatatattaagtttaaaatagagtgtttttttttgttgtttgatgatatgaggaatattatagttattgtggtggtggtggttgtttttatattaatatattgggaagtatgttggatttttttttattatatttatggatgtttgattgtttagataatgtgatttttttggtggttatatatttgatttgtaggtatagtatttaaaagagtaattttttgaattttgaatttaaatttttgtgtataaagaaatgagaaaaaatttaaagttatatgtgtaagtatgaatttttagatttttgtataaaaagttgtatagatgagcgtatatatatttttttgggagtatatttataaatgttattttttaaagggatttgagatttaaaataagattaaaaattgttagcgtagtgttgatttttaaagattaattttgatagggagaaaaaaagaataaaaaattttatttttaggttataatttatcgttattattttttaaaatggtttttatgtattttttttttatttaattttgtatattttttgcgttatggttgtttttagaatttggagttgattgggggaggagaaagagggatataagagaggtagggaataattaaaaaaataaaaaaataaaaaaataaaataaacgaaagaatatagaaggagaaagaggaagaggaaaagggaggggtagatgagagaggttgagtggttttatgtatatttagttatgaggagtggaattaaaattttattaggaagagatttttatattttataatttatataaagaatgatgacgtaatatttgagtgtgtgagtgttggggtttggagggggtatttgagattatttttatataagtataaggtggaaaaataagtgggggttttaaagtggtttataaaatttttcgagtggcgtttttgtttttgaaatattttgttagatgagtgttttttagtgtgtttgtgatttagttagtttttatttattaaaagagtttgggaggaaatatttgtagttgttaatattaatttatttttttttatgggtaattttatttcgaaaaatgagtgatttatatgggtttatggagtttggttaaaaattattaatagtaggatttagttaatttttttataagatgggtttttatttaatgataattttttttgttttattgtattatatttttttgtttagttttgatatttttatatgtgtttttagtattttgttatagtatttttttaggtatagaaggaatagaatttatagattttatagtttttttggtaaatttaggtttagaaagaaaagatattttgtttgtgtttgttttttaaattgtatttttattagttaaagttttatttttattatttggtattgttgggtttttttattttagattattagtatgtacgttttttagttttagaggttataattattttttatttgtttagttaataatttttatttttttggtttttattttgatattttttttatagggaagatttttttgatttttgatttaggttgggtttttttgttatagatttttaatggataatgaacgtatttttttatattatttattacgtgtttaattttggtttaatgtttgtaattttttatttttataagtttttaagagtagggattgtgtttgttttatttattatagtatttttaatatttatttgggatatagtaggagtttagtaaatttttgttgtttaagtgaattaataaaatagaatgggatgaatgaaaaatgagtaaatgataatatagagtttaagtttttttttttttaaaagtagaatgtattttgatttgtttttatagtatttttaagaggtatattatggaagaaagtggtggggatttttttttttatttgttagttgaggatatggaagtgttttaaatataaattttaggttttaggtataatagataatttgttaagaatatttgaaattttttatttttgtatttgtgtttttttttagaacgtttttttttaagttttataaaaattaagtttatcggatttatttatttggggttaagtttttaatatttatttttattaattttattttaaatgtgtatatgagatatattggattagagttaaattttttattaaatgatttatagtaaatagtaaatgttttggttttttatttttttttaggatgatgtgataagagtaaggttaattgttttatgtgagtaaatagatattttataggtaagaaataaggataaattattttttttatttataaaagagggaggaggtagttatttttttttttcgttttaaaggtttgttttttattttaatattttggtaggtagataaatttttttaggagttagatagttcgttatatgttttggtttttatggtaagttttgggatttgattttaagttttggggtttatttttttttgtatgttgtataatgatggtataagtttatgttggtttgtttaggaagatagtgattttaggttttatggtattttgggcgttttatttagggattttgtttaggttataattatttgtttttttcgggaaaaattttattattcgtttggattagagtaattatttatgtaaataattatagatttaatttttatggtatgaaaaaatgttagagttagtattttttattaggatattgaaaagtcgagagaagttttatttttttattttttttatttttgattttttttttgttatgttaaaaaattgatatataatagatgtatatatttttagggtatatgtgttgtttgatatatttatatgttgtgtaaagattaaatcgggttaattgggatatgtattattttgagtattttttttttttttatgttaagaatatttgaattatttttttttagttattttgatatgtataatagattattgttaattatagttatcgtattgatttattaaatacgaagatttatatatttggaaagatatataagaaattggttatagtggttgtttttagtatgaggtatggaagggaaattagtttttattaaatatttttgtgtattgttgaagttttatagatatgatatgttttatagatgtgataattaataaataaattagttaataaaaaaaaattaaatgaatatttgtatgatgaaaaaaagtttttattttttaaattttaggttaaatattttttatatgttttttacgtttttttgtgatttttattagttttttattttttggatatttttatattttaatttattttaatttaatttaatttatattttttaattatagatagtatattttaatttttattatgggatttggatataaattttggtattttttttatttttgttttttaaatataggtttgtttagttttatttattgaggtttttggagttaggtagttatgtgagcgtagagaaattgttaaattattttgtgtttttttttttatttataaagttgtaatggtattaataatatatatattttttatagggttggtgtgaaaatgaaatgattgatatatataaagtatttagaatagtgtttggtatatggtaagtatgtagtatatattagtattatttatttaataaatatttgtggataggtttttagtatagatatagtgttaggtgttgggtagtggttgttgtttattttgttttttttatattttgtatttttgtatagtggttgttatattatgtgtttttaatagttgttgaatgggattatttaaagttaaatttatggattaaattaattagttttgatattttgatttttagtttagtgagggagatagtgaaagtgatagtattatattatagtattaatatttttgagaaatagaagtgtttagattgatattttgggatagaatgggttattgaatacgtaaggttaggttaagtttagaatttacgtatttgttttttatttttttttaaagtgtgtgaagggggtgtagaggaattgtatggaggaataaaaaaaatttattgatataaggttattaattataataaatgtattattttggtgggggatattgataataggggaggttatgtatgtatggggtagagggtatatgggaaatttttgttttttttgtttaattttgttgtgaatttaaaattgttttaaaaaataaagtttattaaaataaattttatcgggggaaatgaaaaatttattttatttggggaagggatatgtggattttttgatttttataattttgattgggaattagaagttgagttgagtagaaatgagaatgggagtggatgttagttttataagaattaagttttttgtttgggtaaatttgttatgattaatttgttttatttgtaaagtatttttgtttgggttttattggggttttataaaagggtgtgtatttaaaaataaaaatattgaaaaatttttgtgaagatttaaagaagaaaatatgtaatgaagtgagtagttttcgattggatagatttgttttgtggggttgggttgtttttttttgatcggcgatttttaaagttttaataagacgagttattggttagtagtgtttaagatgttatgggttaggttggttaagaggttagtaagtatagagatggaaaagtttagtttatagtttagtattattattttattatattttatagttattaagaggtgttttagaaatggtgtagttataaattggttgtaataacggaggtttggttttttttgtgattatttaaagtggttcgatttggttttttgagtttcgagtttagtttttttttttttagattttgggaagtacgagttatggatttgtagattttaaaagaaagtgggttgagtaagttttgttcgtttggttgtttggtaaaagatatatttattgtgtagtatttttatatttttggtatattacggtgttttttttggaaaagtttatattggatttgcggttttgaaaattttaagtttaaaatattttgggttttaggattttttttcgtgttcgtaatgttattttttttattttaggttattttttatagtttaaataaataagtagaaggagatttttattttatttatataggtagtttaaagtttattttttgtttggtttttttttttttaaatatttttttttatagttttgatatttttaaatagaaagtaatagtttgttttgggaagaagatagatagaaagataggaatagagtttagatttaaaggtagtttttgtttggtttttttgttggagttattttttgagggtttttaatttgtattttttatatattgtaattagttttagtttttagaaattttaatttttttttttttgtttttttggatttttttttttaagaaaatatatattagtatgatcgtattgtggttattgttggtttttagttaaaagtttggagtttttatttttattttttttttttattttagttaatgttttttgttgatttatgtttttggtttgttagtttgtatgtgtatagatttttttttagggtagggatgtagggtaaatttttttttagagtttagtttatttagtttagtttttttaggttgggtttttgttagaagatgtttatgtaaaattaattatttaagtaagatttttattagggtttgttattttaagattggttagaaaagtgattggagtttttggtttagagttttttatttttttggaaattggggttggtggggttgagttttggaaatttaagggtttaggaatttataatgtttttttttttttgaaagaggtagttgaaattgatagttagtttttaaggaagagtgattaaatataatatttagttttgtattttttttttatttacgaagatacgttgatttttggtagttaatatgggatttaaattattaggtagatgaatatttatttgtttcgtagtttgttttaaaagttagggagagaaatagtacgaaggttaaggagaggagttttttgggatttattagttaatgaggagaaggaagggattttggtcggagtttggtagttgtttatagatgttaggtagaagtaagtttcgtgttatgtagtagaggttgtttgatttatgtattaggaattagtaggtttttgaattcgttttttgtattattgggattttttttgtttgtgttttgaggattgtttattttttatgaggttttaaattatttttttgtttttaagaagtaggttttttaagaagttaggtatttagtttatgggagttaggaaagggggtgtgtagttatttcggttaaaattcggttttgggtagaaatatgcgttttagtttttttttttagttgtttttaggaatcggatgttgtagattttttgagtagtttttttcggtaagtttttttggattgtaaagaaaagatgttttattggattattttttaaatttggtagtttatagttgaatttagataattgtattttgatgagttaatagattttttatttttgttttattttataattttagatgatattttaatatgtagtttggtgtaggtgttattgttatatagagatgggaagggtatgtgcgggttatttggaagaaattttgtgatttcgatgagtgtaatgtggtataatttagtagtttatgtttttagtttgtttttttgtatgtgtgtggatttttttttaggtagggatgtaggataaatttattttagagttttatttttttagtttagtttttttgttgtgtgtgtgtttttttttttaatttttaacgtttgtgggtatatagtagatatatatatatgtgtgtgtgtgtgtgtgtgtgtgtgtgtgtgtgtgtgtgtgtgtatgtatatatatatgtatggggtatgtatatatttgtatggggtatatgagatatgttgatagaggtatgtaatatgtaataattatatagggtaaatgggatatttattattttaaatatttattttttgtgttataaatagtgtaattatatttttatttttaaatgtgtaattaaattattattgattatagttatattgttgtattattaaatattagtttttatttattttttttatttttttgtatttattaattatttttattttttttttaatttttattattttttagtttttggtaattatttttttattttttatgtttataagtttaattgttttaatttttattttttataagtaagtgagaacgtgtaaagtttgtttgtttgtgtttggtttattttacgtaatataatgatttttaattttatttatgttattgtgaatgataggatttaatttttttttagttgaatagtattttattgtgtatatgtattatattttttttatttatttatcggtgatagacgtttaggtcgtttttaattttggttattgtgaatagtgttgtaataaatatgggagtatagatatttttttaatatattgatttttttttttttaggtgtatatttattagtgagattgtggattatatggtagttttatttttagttttttgaggaatttttaaattattttttatagtggttgtattaatttatatttttaataatagtgtataagggtattttttttttatatttttgttagtatttgttattatttgttttttggataaaagttattttaatttaattggggttgtgttgtattttgggagttgtttttattttggagtttgtgtttaattttttattgaggagaaggaattagtattggtagaaggaggatttcgtttttttttatgagttaaattataagaatgggatattggaagtgtaattaatgtttatagggagatttgaaagagtagggaagtgtttttagagtttattgtaataggttataggtattttttgatgggtttttttatggggattaggtaataaaagttggtgagatatgtgaattttatttttattgttttttttttttttttttttagtatttaattgttttttttataattatttttagtggtgtgtgttcgagttagtatgtattaatttataaaattgttaaatttttaggaatttggatgggtatagtggtacgtttgtaattttattatttgtggaggtttaggtgggagaatttttgaggttaagagtttgaaaatagtttgggcgatagagtgagattttatgtttataaataattttttttaataaaaataaaaaatagatttttaggaattttgtgaggtgtttgatgaatatggttattattaaatatataaaattaaattaaattatataaatttatagttaagttgggtatggtggtatatgtttgtagttttaggtatttgagaggttgaagtatgaggattttttgagtttaagagtttgaggttgtagtatttttatagtagtgtgaaaacggattattatgattatgtttgttggtgtggtttgtcgttgtgtttttatttaaattttatttcgaattgtaatttttataatttttaagtgttgagaaagggataaggtgggaggtgattggattatgggggtagttttttttttatgtcggttttaagatagtgagtgagtttttataagattggatggttttataaggtagtattttttgtttttggttgttttttttttttttattgtgatgtgaagaaggtttttgttttttttttgttttttattatgattgtaagttttttggggtttttttagttatgtggaattgtaagtcgattaaattttttttttttataaattatttagttttgggtagtatttttatagtagtgtgagagtggattaatatatttgtaaatagtcgttgtattttagtttgggtaatagagtaaaattttgtttttaaaaaaaattttataattaaataaattatattaaatagagggaataaaattttaaagtttattgttttttaattattttatgatattattgatatttatgtttttgaggtaattgatattttttatgtgtttatagtggaaattaaatattggaatattggtgtttttggattttttttttttattttgtatttaatggtatagtgttgggagtttgaaattggttatggtgagagtttatgttatggaaattagtaagtaatataaattagaattttattgttttgttgattgtttaaatgtaagaaagtaatagagaaaatataatgatgtagagtaaatttaaatatgtgttatgattatggtttttatattaggattagtataaaaaattgaggaaatatttttttagtatttaaaaattattatttgatttagtaaaaagttattagtgttattgatgagtaagtgatgttttaatatatgtttttgttgttttatatttttttaattttaaaaaagatattaattaatatttatgttggaattatatttttttgttatttgtaaatatagtttggttgtggatatgaattaagttaatatgaaagtaaatagtttgtgagatttgtggttatatggaatttataataaagaggattgtatattttattaaaatataataaattttattttataaattgcgtgttatatatttttcgtataagtaaaatttataataagtttatttatatatatgtatatattattttttagagatttggtttttaattatttattaatatattattgttataataattgagaatttaaatggtggagtgaatggtatattgtttacgtatttataaaatattagttgaaataattaaatgatgtgagaatattggtattttgtaaaaatgggaaattaatgatttaggtttgattttaagattggtgttttttttttaagttgtacggtttttggaatgtatgttgtttatttatgttaaattttttttttttaaagatagatatttatttttttgtttattttgtttttttttttatttttagaattagattttttttagattcgttatgaggtttttttattttgattttttggattttttttatatagataattgagttaatgttaggtattatatgaagagtttttttgtttggtgtaatttagaattaaataaaaatatatattgaatgagggttagaaatggtttagatgaaggttttgaggttttagagtggattttatatagagttttttttgtttttaaatttttttttatttggaacgttagaatgtggatttatttggaattaggattttttagatgtaattaaggtaagaattgagatgagattatattgggtgaattagagtgatttttaaatttaatgagagtagtgtatttttttaagaaatagaaaaaggatatatagagatataaagaagatggttatgtgaaaagataaagtagagattagagttatgtagttataatttaacgaatattagagattattagacgttggaagaggtagagaaagattttttttttgagtttttagaaggagtaggttttgttaatatgttaattttagattttgtgtttatagaacggtgggagaatgaatttttgttgttttaagttattaggtttgtgataattttttatagtagttataggaaattaatataggatttgaggggtaatgtgattaattagagatttgtagttagtatatttagtatattgagttgtttttttgagttattaagagtagatgttaatagattaataatagaagatatataggtgatagtgttttgtagttataaagttatttttaaaagtttttatatttatagttttatttgatttttttaatagttttgtaaaggagttggtggtgtttgtaaggtaggatttggattaaatttgggaattttgatattgattagagttttttttttttttttggtgagtattattatgaatatttaagagaataaggaggaaggaaattttgttattgaattttttggatgtttggggtttttatagtgttattttattgattttggtagtagtaagaagtaggagtagttatttttattttataaattgaagtatagtgttgttaaataatttgtttaatggtttagagttaaaaaaaatgtaagagttggatttaaattttgga

SEQ ID NO: 139 - DNA, 6351 bp, Artificial Sequence
  chemically treated genomic DNA (Homo sapiens)
atagtatagtatgtagtttttatttattttattttatttattttattttaagttatgggatatatgagtaaaatatgtaggtttgttatataggaatatatgtgttacggtggtttgttgtatttattaatttattatttaggttttaagtttcgcgtgtattaggtatttgttttaatgtattttttttttttgttttttattttatgataggttttagtgtgtgatgtttttttttttgtgtttatgtattttttttgtttaatttttatttgtgagtgagaatatgtagtgtttggttttttgttttttttagtttgttaaggatgatgatttttagttttatttatatttttgtaaaggatatgaatttatttttttttatggttgtatagtattttatggtatatatgtgttacgttttttttatttagtttattattgatgggtatttggggtatgtagttttatagattgtatttttttttatatttttatggtatttgttatttatttttttttttgagtttttttaaataagggtttttatgtgattagagttaatgaatatttttgggagattgtagaagtagaagaagaaagttagaggtttaagtgttaaattattaaggtataagatttttttattatgtttttttttttattttagcgatatgttttgttatgtgtattaataattataaataatgtttagagattggagaattaatgttagttttaagggattttgagtgtaggatgggattgaattttaagttattaaatgttagagtagtagttagagtattgttagagtaaattttatatgaatttttgttgtttataatgacggaaaatttaaggaatttattagtttttatgtgttaaaatttttttttgaatgttttttgtgtatttttatattgtagttttgttttaaagattatgattttggttaggtgcggtggtttatttttgtaattttagtattttgggaggtagaggtaggtggattatttgaggttaggagttcgaaattagtttggttaatatgatttaattttgtttttattaaaaatataaaattagtcgggtatggtggtgtatgtttgtaattttagttattaggggggttgagttaggaggattatttgtatttgagaggtagagattgcggtgaagtgggattatgttattgtattttagtttgggtaatagagcgagattttaatttaaaaaataaaataaaataaaataaaaattaattaattaaataaataaaatattatgatttttatatattttttttttttaatgtggtgagaaataatatgagatttatttttttaatatattttgaagtgtataatattgtattgttaatatttatacgatgtgttgtatagtatagttttagaatttaattattttttttgggtaaaattttatatttatttaatatttattttttttttttttagtttttgataagtattatttattttgtttttacgagttggattattttatatattttttataagtggtattatgtagtatttgtttttttgtgattggtttattttatttagtataattttattaaggtttatttatgttgttatatgtgataggattttatttgttattatgattgaattattttaattgtatgtatatgttatttttattagttatagatattttaattgtttttattttttgatttttgttaatagtgttgcgataaatataaaagtgtaaaagtgtaaatatttttttataattttgattttaatttttttggttgtatatttagaagtgggattgttagattgtatgataggtttattttttatttttaggtaatgttatattgttttttatagtggttgtattattttatatttttattaatagtgtataattgttttaatttttttatatttttagtaatatttatttttttatttttttgagagtagttattttaatagatgtgagataatattttagtatcgttttgatttgtatttttttgatagtgatgttgagtacgtttttttatatttgttagttaattgtatgttttttttggaaaattatttgtttaagttttttgtttattttttaattttcgtttttgttatagatttgaagaagttttttgtatattttggattttaattttttgttagatgtatgtaaatatttttttttattttataagagaattttttttattttttattgttttttttgttgtgtagaagatgtttagtttgatgtagtttaatttgtttatttttgtttttgttgtatttgtttttggtatcgtatttaagaagtatttggtaagattaaatagattattttgttttgatgtttgagtagcggttgaggtaagttgtttagtgttgattaaattattatgtaaagtataaattttttttgaggtgataattatggttagatataatagttttttaaattatttttatttttttaaaattgtataaaatattaaatatataatttttattatatatgataaaagttataaagttttttttttgtgtttttttttttaggagttttatagttttaggttgtaatttaagtttttaattttatttgagttgatttttgtatataatataagggtttaattttatttttttatgtgaatatgtaatttttttaatatatatgttgaaaagatatttttatttttttatgattagttttgttgattgggttatgttattttttttttttaaaaataaatattatagaattagtaagtatttttattttttttttattgtgatgattttattttagttttaggatatatatgaagaatatgtaggtttgttatataggtatatatatgttatggtggtttgttgtatttattaattcgttatttatattaggtattttttttaatgttattttttttttagtttattattttcgtaataggttttagggtgtgatgtttttttttttgtgtttatgtgtttttattgtttaatttttatttatgagtgaaaatatgtggtgtttggttttttgtttttgtgatagtttgtggagaatgatggtttttagttttatttatatttttgtaaaggatatgaatttatttttttttatggttgtatagtattttatagtgtataggtattatattttttttatttagttttttattgataggtatttaggttggttttaaagggttaatatttagaatttataaggaatttaaataaatttataggaaaaaaataaatgattttattaaaaagtgagtaatggatatgaatagatattttttaaaagaagatatttatgtagttagtaaacgtatgaaaaaaagtttattataattggttattagagaaatgtaaattaaaattataatgagatattattttatgttagttagaatggcgattattaaaaagttaggaaatagtagatgttggagataatgtggagaaataggaatgtttttatatagttggtgggagtgtaagttagtttaattattgtagaagatagtgtggtaattttttaaggatttagaattataaatattatttgatttagtaattttattattggttatatatttaaaggattataaattattttattataaaaatatatgtatatatatgtatattgtggtattatttataatgggttatattatttttttggttataaggttattatatgtttggtatttttgttaagatgattttggaatagggaaatagaataaataatgttgatggattaagagaagattgattaaaaaaataaggagtagagtgttatgataattatattgatatggatttgattatttaaatatttttaaattaaattattatagaatgaaattttgttttttagggattgtttttttatataaagacgggtatgataatatttgttttatagaatttttaaagattagaaattaatgtaaattgattatgttaatatataaatattttatagatgttgattttttttttttaaagataaaataattttttttttttattttaattttagataaatattttttagtgtatgtgttatagtgtagtttttaaaattatgtttttgtttttattattaaatttgatttgaatataatgaaattatatggaaaagtaaagtaatttagatttttaagaagagaatgtaaaggatttttagtttttttatgtgagatttaagaataggggaaattataaatgtagaattaaaatttttttttgtagattatggaagttagattatttaagttgtatttatattggaatgaagtttggtatggatagttttattggtttgtagaaaggtttaagagtattttattattttttttttgtttgtttgttttatttttgtaagttagtttaaaataattatgtttatggaaaaagtttatttttttttgttttttattaaaattaatatttataataggatgatttatattatatatattagaagttagttatatttttaatttttttgtgatattattggtttgttaaataaggtattttaatttttgttttataaaatattaatgaatatattatataattttttttgttttttttatttaaatgattaagagtataattaaattagatttttaaagattaaattgttgaggttaggaataaaattttattttgtgaaagattttttagaaaaagttaggataattcgttgatttaaagattgtgaaaaatttgtagttgagttggatgaagttgttgagttgtattttttaaaaatatatgggttttttttttttaattttttatttaaaaattttatttttattttttaagttttattgagtaattttgaaagttagagttttttaaaattgttgagttatttagtatttgtaaaatttagtagttgttttagttgagtatgttttttaaagataatgtcgattgtgtatggttgatgggattttaggattaagtaagaggtttttttttttttttttatatatttaacgtttttatatttttatttgaattcgattggatagttttatttgaattatttttttttttttttttttttttttgatatattttattttgttaggttttaaatttttaggaaaaatggagtaatttttaaaggaaatcgtgagtatatattttttttttatgtaatttgttattaatattattaggaaagatgttttttttaaattttttatattattttttttaggaatattaataattatttggtttttaataaatagataattttaattattttttgtgaataataattttgagtttatgtttgtgtagtattaagatttagtaatgatttaagtcggtttttagagagaataagtagggagattgaagttaaataatatttagtaataacgtgagtttttatggaatgatttaattttatagttatgttagtaatggtaatttatagagtagtaattatatttaggaggaataatgggagattaaaatttaaattttatattaaatattttggttgaggtaagttagggaaaatggtatttatatttagaagaatgaaggtgaattttatggtgattttgttggatattgttataaataggttggtttttattttgggaaaaggatatttatatattgttttagagtaaaaggttttatattttaaaaataaattgtagatatgttaataatttgaaatttgtgataattgggtagaagatagttgaatttttgatttatagtgtttgtgagtaaagtaagtaaagagtaaatatatgagatttatttttaagtatgaaggaaataaaatttttaaattgttgtatatattattaattaaattaattgtaagttatttttaattatttattaaattaagttaaaaataataagtattttttaatatttttttagtttttgaaagtaataatattatatttttttttatttatcggaaattatgtgattttgttaatttaaatttgttttatgaatagtttaatataattatatttatagaatttaaatgttagtataaatttatgtaaaaagtgaggagagttttttggataattaagaatttttaatttaaatagtagttatgtttggttaaaaattacgtaaatatattatagtttttttgataatagtttttagaaattttaggatatttgaatataggtttaatatgagtaaatattttgatatatataagcggggtaatatgttaaatatttgagaattagtaattaatagaatttttttaatttgtagg

SEQ ID NO: 140 - DNA, 6351 bp, Artificial Sequence
  chemically treated genomic DNA (Homo sapiens)
tttgtaagttaaaaagattttgttaattgttagtttttaaatatttaatatgttgtttcgtttatatgtgttaaggtgtttatttatgttggatttatatttagatattttgaagtttttagggattattgttagaagagttgtagtatatttacgtaatttttaattagatatagttattgtttaggttaaaaatttttgattatttagaagattttttttattttttatataaatttgtgttagtatttaagttttatagatataattatattggattgtttatggagtaagtttaaattagtaaaattatataattttcgatagataaaaagaaatataatgttattgtttttaagggttaaaaaggtgttgagaagtgtttattatttttaatttaatttaataaataattaagaatggtttgtaattagtttagttaatgatatatgtaatagtttgaaaattttgttttttttatatttaaaaataaattttatatatttattttttatttgttttatttataaatattataaattaaaagtttagttattttttgtttaattgttataaattttaaattattagtatgtttgtaatttatttttgaaatataaaattttttattttaaaataatatataagtattttttttttagagtgggagttaatttgtttgtgataatatttagtaaaattattatagggtttatttttatttttttggatatggatattattttttttagtttattttagttaaaatgtttaatatagagtttaaattttaattttttattattttttttaagtataattgttattttgtgaattgttattattggtatggttatagaattagattattttatggagatttacgttgttattaggtgttatttagttttaatttttttatttattttttttgggaatcgatttaagttattattgggttttggtgttgtatagatataagtttaaggttattgtttataaaaaatagttaaaattatttatttgttaaaagttaaataattattaatgtttttgggaaagatagtatagaaagtttaaaggaaatattttttttaataatattaatgataaattgtatggaagagaaatatgtatttacggttttttttggaaattgttttattttttttaaaggtttagaatttggtaagataaaatgtgttagagagagagagagagagagagaaataatttaaatggaattgtttagtcgaatttaaatagaaatatagaaacgttaagtatgtgggggaaaaaaaaaaaattttttgtttggttttagaattttattagttatatataatcgatattatttttagaagatatatttagttgaggtaattgttaagttttatagatattgggtgatttagtagttttgggaggttttggtttttaaagttatttaataagatttaaaaaatgaaagtaaggtttttggatgaaaaattagaaaaaaaaaatttatatatttttaggaaatatagtttaataattttatttaatttaattgtagattttttatagtttttaagttaacgaattattttggttttttttagagagttttttataaaataagattttatttttaattttaataatttggtttttaaaaatttgatttagttgtatttttaattatttaaatggaaggaataaaaaaagttatatgatgtgtttattaatattttgtaaaataaaaattaggatattttatttgataaattaatgatgttataagaaagttgaaaatatggttgatttttgatatatatggtataaattattttattgtaagtattaattttaatggagaataaaaggaggtagattttttttataggtatagttattttagattaatttataaaaatgaaataaataagtaaaaagaaaatagtgggatgtttttagatttttttataagttagtggggttatttatgttaaattttattttagtgtaaatgtagtttgaataatttaatttttatgatttataagagaagattttgattttatatttgtggttttttttgtttttggattttatatagaaaaattgagagttttttatattttttttttgaaagtttggattattttatttttttatatagttttattatatttaagttaaatttagtagtaaaggtaggaatataattttagagattgtattataatatatgtattgaggaatatttgtttgaagttgggataaggagaggaaattattttatttttaagagaaaagaattaatatttatgaaatatttatatattaatatgattaatttatattaatttttaatttttaaaaattttgtgaggtaggtattattatattcgtttttatatgagaaaatagtttttaaaaaataaagttttattttatggtgatttggtttgaaagtatttaaatagttaaatttatattaatatgattattatggtattttgttttttatttttttagttaatttttttttagtttattaatattatttgttttgtttttttgttttagaattattttagtaagaatgttaaatatgtgataattttgtgattaaagaaatagtatggtttattgtgaatagtgttataatatatatatgtgtgtatgtgtttttatagtagaatgatttataattttttgggtatatagttagtaatgggattgttgggttaaatggtatttatggttttagatttttgaggaattgttatattgttttttataatggttgaattaatttatatttttattaattgtgtaaaagtatttttatttttttatattgtttttagtatttgttgttttttgattttttaatgatcgttattttaattggtatgagatggtattttattgtggttttgatttgtatttttttaatgattagttatgatgagtttttttttatacgtttgttgattgtataaatatttttttttgagaagtgtttatttatatttattgtttattttttgatggggttatttgttttttttttgtaaatttgtttaagttttttgtagattttggatattagttttttggaattaatttgaatgtttattaatgaaagattggataaagaaaatgtggtatttatatattatggaatattatgtagttataaaaaaggatgagtttatgttttttgtagggatatggatgaagttgaaaattattattttttataaattattataaggatagaaaattaaatattatatgtttttatttataagtgggagttgaataatgagaatatatggatatagggagggaaatattatattttgaagtttgttgcgggggtggtgggttaggggagggatagtattaggagaaatatttaatgtagatgacgggttgatgggtgtagtaaattattatggtatgtgtatatttatgtaataaatttgtatgttttttatatgtgttttagaattaaagtaaaattattataataaaaagaaagtaaaaatgtttattaattttataatgtttatttttaaaaaaaagaaatagtatggtttaattagtagaattgattataaggaaataaaagtgtttttttaatatatgtgttggaaaaattgtatatttatataaaaaaatgaaattggatttttatgttatgtataaaaattaatttaaatgggattaaagatttaaattataatttgaaattgtaaaatttttggaaaaaaaaatataaggaaaaagttttatgatttttattatatataataagaattatatatttagtattttatatagttttaaaaggatggggataatttggagggttgttgtatttggttatggttattattttagggagggtttgtattttatatagtagtttaattagtattgaatagtttgttttagtcgttgtttaggtattagagtaaagtgatttgtttggttttgttaagtattttttggatacggtattagaaataaatgtaataaaagtaaaaataaataaattggattatattaaattaaatattttttgtatagtaaagaaaataataaagaataaaaaaagtttttttatggaatggaagaaaatatttgtatatatttaataagaggttaaaatttaaaatatataaggagtttttttaaatttataataaaaacgaaaattagaaaatgagtaaaggatttgaatagatgattttttaaagaagatatataattggttaataggtataagaaaacgtgtttaatattattattaggaaaatgtaaattaaagcgatattgagatattattttatatttgttaggatggttatttttaaaggaatagaaaaataagtattgttgaaaatatgaagaagttggaataattgtatattgttgatagaaatgtaaaatggtgtagttattgtggaaaatagtgtagtattgtttaaaaatgaaaaatagatttattatataatttagtagttttatttttgggtatatagttaaaagaattaaaattaggattgtaaggaggtatttgtatttttgtatttttatgtttatcgtagtattattaataaaagttaagaaatggaaataattgaaatgtttatgattgatgaaagtggtatgtatatataattgaaataatttagttataataataaatggaattttgttatatatgataatatgagtgaattttgatgaaattatgttaagtgaaataagttagttatagaaggataaatattgtatgatattatttataggaagtatataaaatagtttaattcgtagaaatagagtaaatagtgtttgttagaggttgagggaaggaaaaataggtattaagtaggtatgaagttttatttaagaaagatgattgaattttagagttgtgttgtataatatatcgtataagtgttaataatatagtattgtatattttaaaatgtgttaagaggatagattttatgttgttttttattatattagaaaaaaaaagtgtataagaattatagtgttttgtttgtttggttggttggtttttgttttgttttgttttgttttttgagttggagtttcgttttgttgtttaggttggagtgtagtggtatgattttattttatcgtaatttttgttttttaggtgtaagtgatttttttgatttagtttttttagtagttgggattataggtatgtattattatattcggttaattttgtatttttagtagagatagggttgaattatgttggttaggttggtttcgaatttttgattttaggtgatttatttgtttttgttttttaaagtgttgggattataggagtgagttatcgtatttggttagaattatagtttttagagtaaaattgtaatatggaggtatataggagatatttaggggaaagttttgatatataaaaattggtgagttttttgagtttttcgttattgtagatagtagagatttatgtaaagtttgttttgatagtattttggttgttgttttggtatttagtgatttaaaatttagttttattttgtatttaaagttttttgaaattaatattgattttttagtttttaagtattgtttatgattattagtgtatataataaggtatgtcgttgagatagaagaaagggtatgatggaaaagttttatattttggtggtttaatatttggatttttgattttttttttttatttttataattttttaagaatatttattggttttgattatatagagatttttatttaaaaggatttaggaaaaaaaatggatggtaaatattatggaagtataaaaggaagtataatttataaaattgtatgttttaaatgtttattaatgatagattggataaagaaaacgtggtatatatatattatggaatattatatagttataaaaaagaatgagtttatgttttttgtagggatgtggatgaagttgggaattattatttttagtaaattaaaagaaatagaaaattaaatattgtatgtttttatttataagtaggagttgaataaagagaatatatggatataggaagggaaatattatatattggggtttgttatggggtgaggggtaaggggagggagtgtattaggataaatatttaatgtacgcggggtttaaaatttagatgatgggttgataggtgtagtaaattatcgtggtatatgtatttttatgtaataaatttgtatgttttgtttatgtattttataatttaaagtaaaataaataaaataaaatgaataaaaattgtatgttatgttat

SEQ ID NO: 141 - DNA, 7104 bp, Artificial Sequence
  chemically treated genomic DNA (Homo sapiens)
taatttttgtatttttagtagagatggggttttattatgttgttcgggttggtttcgaatttttgattttaggtgatttatttatttttgttttttaaagtgttgggattataggtatgagttattgcgtttggttgattttaggtttttttaaatttttaattttggtatggttatggtacgaaatgagtatgttgatatagaaaattaaattgttatataatttttttgtgtattattgattagatttgtcgatgtttttttattttaataggtttacgatttatagtttatttattagtttattgatatatttaaagtaaatttttttttatggataagaatacgagtatttaaatgtaattttgaaaagattgatttgtgaattgtttttagtgaagaataaggaaagagtggtggtggatagagattttttttgataaattggagtaaatgtattttattcgtgtatgtagtaaattatattaatataatttagtggtgattgtttatataatattatatagaaggtatattatacgaaataagtgaggaaaatatataatagttacgatagaatttgttattttaagtatatgagtggagtagagagtggagaaagagttttaagaaataatatggatattacgatcgaaatatatattacgaagcgattattttagtttttattttaaattatataataatatatttaataattattataaatttatatatatatttgtatatgaataaaatgagtgagaattataaagtcgtaatttatgagagtttagattttttttttttgtgtggaaaaaaaataatatattgttatatttttgttttggaggtttttgaagttttgttgtgaatttaattaaatttagattgtttttaagatatagtattttttggtcgggcgtggtggtttttgattgtaattttagtattttgggagtttgaggtgggcggattatttgaggttaggagttcgagattagtttgattaacgtggagaaattttgtttttattaaaaatacgaaattagttaggtatggtggtgtggttttgtaattttatttcgggaggttgaggtaggatagttatttgaattcggtaagcggaggttgtggtaagttaagattgcgttattgttttttagtttgggtaataagagagaaattttgttttaaaaaaaaaaaaaaaaaaaaaaaaagatatagtattttttttaagatagttgatgtggtttattttttaggttagtaggttgttttaaaatattttaagggttgggtatggtaattgtaattttagtattttaggagattaaggtggaggattatttaagtgtagtagttcgagattagtatgggtaatatagtgagatttcgtttttattaaaaaaaaatgaaaaaaaaaaaagttttaagtatttagttgggtattgtagtatatatttgtaattttagttatttagaagattgaaaggggaggatcgtttgggtttaagagtttaaggttaggttgggtaatataatgaaattttgtttttttaaaaaaaaaaaaagttttgagtatttggtatatttagtatatttaaggaaagcgagttttatttgaggttttttttaaattttattttatttttgagatagggtttggtatttttgttcgggttggagtgtagtggtacgattacggtttattgtaatttttatgttttgggtttaagttatttttcgattttagtttattaagtagttgggattaaaggtaagtattattatatttagttaaattgatttgaggtttttgtattttattttgtgttttttttttttttgttttattaattgttttttttttttgattagattttatatgtatgtggtataaattttaaaatgtataaaaggatatataaataaagagtattagtcgggcgtggtggtttacgtttgtaattttagtattttgggaggtcgaggcgggcggattacgaggttaggagattaagattattttggttaatatggtgaaatttagtttttattaaaaatataaaaaattagttgggcgtggtggtgggcgtttgtagttttagttattcgggaggttgaggtaggagaatggtgtgaatttgggaggttgagtttgtagtgagtcgagattgtattattgtattttagtttgggcgatagagcgagattttattttaaaaaaaaaaaaaaaaaattgtgtatttttttttgttttttagttattttgttttttttttagaagtaattagtgttattggttatttgtgttttattttaggttttatatatttatatatatatattatttatatgtgtgtgtgtgtgtgtgtgtgtgtatatatgtgtgtgtgtgtattttttttatatatatatttgggaatataatgtatataatattttgtattttttttttttaattgattatatattttattaagttagtatgattaaaattgttttattagttttaatgattgtagagtattttattatgtaggtaaattataattgatttaattaggatatttaattatggatatttagggtttttaagagagttttttaaattaagatataatttatatattataaaatttatttttttaaagtatataatttagtagtttaatataagaatttttttttttttttttaagaggtagagtttggttttgtcgttttggttggagtgtagtggtgtaattatagtttattgtagttttgattttttacgtttaagtaaataatttttttattttagttttttaagtagttggaattataggtgtgtattagtatatttaattaatttttaaatgttttgtagagattgggttttattatattgttaagtaggtttaagaatatttttattgttttagaaagaaattttatatttatgatatttagggttttgtcgttttttgttaaaattaattaatattaaaataataataatattgttttggatatttttatatatatattatttggtatatgtgaaagaatatttacgtgatagttggttatggtggtatatatttgtaggtttagttatttagggggttaaggattttttgagtttagaaatttaagtttagtttgggtaatatagagagattttatttttaaaaaaaaaaaaaaaaaaagtgagtaaaaaagaatatttgtagtataaatatttggaaatggatttgtttggtaagttgatttgtgtatttaagattttgaaagatattgttaaattgtttttattagaggttatatgagtttgtattttgttagtgtataaaagtttttatttttttattttttgttagtagaattttttatttaatttttttgtttttgttaatttgataggatatgtagtattttattataatattaatttttattttttttattgtaagtaaggttgattattttatatgtttaggagttagttgtatttttttttttgtgaattgattgtttataaattgattaaatttttgatattttggatggattttgataaaaaaattttttttatttataagagttttttatgtattagggagaaaagttttgataaaaaattttttttatttataggagttttttgtgtattagggagaaaagttttttggggtatgaagtggaggtattttttttagttatttttgtttatttgttttagtttttgattttgtttatgatgtgttttttttttattatgtagaagttttgtattttatgtcgttgattttgttagttttttatgatttgtgtgttttatgatatttttagattttttttattttaagattgttaaaaaaaaaaaaatttttttatgagttattttattattttaaggttttttttttatttattatttaatttttagatttatttagaatttatttttgtgtaagatatgaggtgtgaatttattttattttttttatatggttaataatttttttttatcgttttgaaacgttatttttatattgtgtttttttgattaaaagttattatttaagatgtttgttggtgtaatttagaatagttttaaatattagttttaattttttaagagaggtagttaggtgtttaggatagtgatttttgaatttttggggtgtttatagtttttttttttttacgacgaatttcgttgtatagcgttttgtatagagtggaagattttttgttttatgtttgttgggttaagtaatagattttaattagttatttagggatttttttttagttttataaaatttatttgtaatattttttttcgttttattttttttattattatttgtttttttaatttattatacgtatttattttttttatttatatttttagtagcggattttcggtttgtaagggggtagtagggaggagttggggggagggggaggtttgcgagtttttaattttgtttttataaataaatttatatgtgtagttgtcgttgttgtaatttattttataatttcggatataagttttgtttttttaagaggaaaaaaaagattttttcgtttgttttttattttatttatttataagaatttttgtttttttatttttatagttagtcggtttcgttttattttttcgtttttttcgacgtagaggaattaataggcgaagaaaataaggtcggggatttgatattattatgttaggttaattatcggacgcgttggtgggaggttttacggatagcgcgttcggaggaaggaagataagagagaggaagtttgaagttaatatggagttcgttagttgtttcgttgttgttgttaggatcggagatatggagttttagcgggatttgagtttggtgtttgagcggttttagagacgcgaataagaacggtagttggaagttgaaaggcggaaataaaagcggtagaattaggaggtagagaaggagaatagttattttttcgtcgttatttttgttcgggagcgagcggtcgtggaagagtttttggagcgcgcggagtcggtcgagcggttggaggaggcggtttttcggttttaggggttgtagaaattaattaacgatttagttttttttttagtcgtttacgatttgcggtagggataagaggcgttggcgcggttgtaggcggttttggtcgagcggcgtcgggggttgtagtttaagaagcgtttcgtttttaagattcggggaaaggatgttgtttcgtttattaaagtagacgcggtttttggtattttttcggtagttgaaagtatataggatttttcgttgtttaagaaggcggaaggagatttcggttttagttgggtttgcggtttttttaatttggagttttaagttttggagaagagagttagcgagttgtattagcgcgacgtttttttgatcgaattgagtaattgtacggttagattgtatggaaattttaatattttgcggttaattaaggtttatagttgtaagttgttttgcggttcggtgtttatttttgtttttttggaggattgtagtgattgcgtgttggtagtggtttgttaatagtttcgtatatatagtacgaaagatattcgtatttttttgtaggtgattagtagggttatcgtggaggattgtagtgggatttagttcgttttttatatttggagttattcggagatcgataaggatttcgagagttttggtttagataggagtaaaaataattggaacgatgttgacgattttaattggttggttcgggatatggtttttttaaattggagtattttttttgaagaggagcgaaatatttagtgggattaagtagttgttattttgttttttatttttattaaatattttttacgttggatttttttttttattgggtttcgaagtttatttattgttatattgtgtatgtttttagtattttaaggttagagattgtaatgggtttttatttgtaatttttattaaattcgtaataggtataatattaaagtatttttgttattttcgttatgtttttgagattgagttttatttcgttttttagcgtggggtgggattataaatacgtattattatttagtatttggaagattacgggggatagattgtttgagtttaggagttcgagattagtttgggtaatatgatgaagttttttttataaaaaatatataaattagtcgggggtgatggggtgtatttgtagttttagttatttgggaggttgaggttggaggatattttgagtttagaaggttttttatttagattttgttttaaagaaataaaggaaaaaaaaaaaaaaaaggatcgggtatagtggtttacgtttataattttaggattttgggaggttgaggtaggtggattagtcgaggttaggagtttaagattagttttgttaatatggtgaaattttttattaaaaatataaaaaattagtcgagtatggtggcgggtttttgtaattttagttgttcgggaggttgaggtaagagagttatttgaattagggacgttgaggttgtattgagttgagattacgttattgtattttagtttgggtaataagagcgaaattttgttttaaaaaaaaaaaaaaaaaagaaatacgtaaagagtgatggtttttcgaaggaattgaatgtttagggataaaggaattatttatggttttttgtttttgagatagtgttttattttgttatataggttggagtgtagtggcgtgatgttagtttacgataatttgttttttaggtttaagtagtttttttgagtagttgggattataggtgtgaattattatgttcggttaatttttgtgtttttagtagagacggggttttatttggtatcgggtttttaatttttgattttaagtgatttgtttattttagttttttaaagtgttgggattgtaggcgtgagttttcgggtttagttttggaatttattaaatatgtatttatattttgatattgttggttattgtttataattcgagtgttttgggaggttgaggtaggagaattgtttgaggttagga

SEQ ID NO: 142 - DNA, 7104 bp, Artificial Sequence
  chemically treated genomic DNA (Homo sapiens)
ttttgattttaagtaatttttttgttttagttttttaaaatattcggattatagatagtaattagtagtgttagggtatagatatatatttaataaattttagagttgagttcgggggtttacgtttgtaattttagtattttgggaggttgaggtgggtagattatttgaggttaagagttggagattcggtgttaggtgaaatttcgtttttattaaaaatataaaaattagtcgggtatgatagtttatatttgtagttttagttatttaggagaattgtttgaatttgggagataggttgtcgtgagttgatattacgttattgtattttagtttgtgtggtagagtgagatattgttttaaaaataaaaaattataggtaatttttttgtttttagatatttagttttttcggagagttattattttttacgtgttttttttttttttttttttttgagatagagtttcgtttttgttgtttaggttggagtgtagtggcgtgattttagtttagtgtaattttagcgtttttggtttaagtgatttttttgttttaatttttcgagtagttgggattataggagttcgttattatgttcggttaattttttgtatttttaatagagaattttattatgttggtaagattggttttgaatttttgatttcggttgatttatttgttttagttttttaaagttttgggattataggcgtgagttattgtgttcggttttttttttttttttttttttttgtttttttgagatagggtttgggtgaaggattttttgggtttaagatattttttaattttagttttttaagtagttgggattataggtgtattttattattttcggttaatttgtgtattttttgtagagagggttttattatgttgtttaggttggtttcgaatttttgagtttaagtaatttgtttttcgtggttttttaagtgttgggtggtggtgcgtgtttgtaattttattttacgttgggggacggagtaagatttagttttaaaggtatgacgaaaatagtaaaaatgttttagtgttatatttgttacgaatttaatggaaattataagtaggagtttattataatttttagttttaaaatgttgaaaatatatatagtgtgataataagtaaatttcgagatttaataagggggaaagtttaacgtggaaagtatttggtaggagtgaagaatagagtgataattgtttagttttattggatatttcgtttttttttaggaagaatattttagtttggggaggttatatttcgggttagttagttaaaatcgttaatatcgttttagttatttttgtttttatttaaattagagttttcgaagtttttgtcgattttcgggtagttttaggtgtaaggggcgaattggattttattgtagttttttacgatggttttgttggttatttgtaggaagatgcgggtgtttttcgtattgtgtatgcggagttgttggtaggttattgttagtacgtagttattgtagttttttaggaaaatagaggtagatatcggatcgtagagtagtttgtagttgtgggttttggttagtcgtagggtgttgggatttttatatagtttgatcgtgtagttgtttagttcggttaaaagaacgtcgcgttggtgtaattcgttggtttttttttttaagatttgggattttaggttggagaaatcgtagatttagttggggtcgaggttttttttcgtttttttgggtagcggggagttttgtatgtttttaattgtcggggggatgttaggagtcgcgtttattttggtagacgaagtagtatttttttttcgggttttgaaagcgaaacgttttttgggttgtagttttcggcgtcgttcggttaaggtcgtttgtagtcgcgttagcgttttttgtttttgtcgtaggtcgtaagcggttaggaaaaaaattgagtcgttgattagtttttgtagtttttggagtcgagaggtcgttttttttagtcgttcgatcgatttcgcgcgttttagaagtttttttacggtcgttcgttttcgaataaaggtggcgacgaaaaagtggttgttttttttttttattttttggttttgtcgtttttgttttcgttttttaatttttagttgtcgtttttgttcgcgtttttgaagtcgtttaggtattaggtttaggtttcgttgggattttatgttttcggttttgatagtagtagcggagtaattgacggattttatattggttttaagtttttttttttttgttttttttttttcgggcgcgttgttcgtgaggttttttattaacgcgttcggtgattggtttaatatgatgatgttagattttcggttttatttttttcgtttattggtttttttgcgtcggagggggcggggagatggggcggggtcgattgattatgggggtgggaagataaaggtttttgtggatgggtggggtgggaggtaggcgggggaattttttttttttttttaaaggggtaggatttatattcgggattgtggggtgagttgtagtagcggtagttgtatatgtgggtttgtttataagaataaggttagaaattcgtaggtttttttttttttttagtttttttttattatttttttataggtcggagattcgttattaggggtgtgggtgggagggatgagtgcgtgtggtgggttggggggataggtagtggtgagaaagatggagcgggggggaatattgtaggtggattttatgaggttaaggggaaatttttgaatgattgattggaatttattatttggtttaatagatatgagataggaggttttttattttgtatagggcgttatatagcgggattcgtcgtggagggaagggggttgtaggtattttaagagtttagaaattattgttttgaatatttgattattttttttaaaaaattaaagttaatatttaaaattgttttgaattgtattaataaatattttaaataatagtttttaattaagaggatatagtgtaaaaatgacgttttaaagcggtggggaaaagttgttaattatatggggaaaataaggtagatttatattttatattttatataaaaataaattttagatggatttaggagttaaatggtggatggagaaagaattttaaagtaatagaataatttatgggagaatttttttttttttaataattttggagtgaggaaagtttaaggatgttataagatatataagttataaaagattgataaagttaacgatataaagtgtaaagtttttgtatgataaaagaaaaatatattataagtaaagttaaagattaaaataaataaataaaaataattaagaaaaatatttttattttatattttagaaggtttttttttttaatatataaagagtttttataaataaggaaaattttttattagggtttttttttttaatatataaagagtttttataaataaggaaaatttttttattaggatttatttagaatattaaagatttaattagtttatgagtaattaatttatagaaaaggaaatataattagtttttaagtatataaaataattaattttatttataataagggaaataaaaattaatattgtagtgagatattatatgttttgttagattggtaaagatagaaaagttggatgaaggattttgttagtagggagtggggaaataggaatttttatatattgataggatatagatttatataatttttagtgagggtaatttagtaatgttttttaaaattttaagtgtatagattagtttattaagtaaatttatttttaggtatttgtattgtagatatttttttttatttattttttttttttttttttttagagatagggtttttttatgttgtttaggttggatttgaatttttgggtttaagagatttttaattttttaagtagttgggtttataggtatgtgttattataattagttgttacgtgggtatttttttatatgtgttaaatgatatgtgtataagaatatttagggtagtattattattattttagtattaattggttttaataaaggacggtaaaattttagatgttatgggtatggggtttttttttggggtaataaaaatgtttttgaatttgtttggtaatgtagtgagatttaatttttataaaatatttaaaaattagttgagtgtgttgatgtatatttgtagttttagttatttgggaggttgagatgggaggattgtttgtttgagcgtaggaggttaaggttgtagtgagttatgattatattattgtattttagttaaagcgatagagttagattttgttttttaaaaaaaaaaaaaagagtttttgtattaaattattgaattatatattttaaaagggtgagttttatggtatgtaaattatattttaatttaaaaaatttttttaaaaattttaaatgtttatgattaaatgttttggttaaattaattatggtttatttatatagtggagtattttgtagttattaaaattaatgaggtagttttaattatattaatttggtaggatatatggttaattaaaaaagaaaggtgtagaatattatgtatattatgtttttaaatgtgtgtgtgggggaaatatatatatatatatatatatatatatatatatatatatatatatataaatgatgtgtgtgtgtaaatgtatagaatttaaaatgaagtataggtaattagtaatattagttgtttttgggaagaaaatagggtgattggggaatagaggaagatatataattttttttttttttttttgagatggagtttcgttttgtcgtttaggttggagtgtagtggtgtaatttcggtttattgtaagtttagttttttaggtttatattatttttttgttttagtttttcgagtagttgggattataggcgtttattattacgtttagttaattttttgtatttttagtagagattgggttttattatgttagttaggatggttttgattttttgatttcgtgattcgttcgtttcggttttttaaagtgttgggattataggcgtgagttattacgttcggttgatattttttatttatatgtttttttgtatattttgaaatttgtgttatatgtatgtaagatttaattaaaaaagaaaaataattaataaaataaggagaagaaggatataaaatgaagtataagaattttaagttagtttagttgggtgtggtggtgtttgtttttagttttagttatttggtaggttgaggtcggaggatgatttgagtttaggatatgaaggttgtagtgagtcgtgatcgtgttattgtattttagttcgggtaaaagtattaaattttattttaaaaataaaataaaatttaaaaagaattttaagtaaggttcgttttttttaagtatattaaatatattaaatatttagaattttttttttttttgaagagatagggttttattatgttgtttagtttggttttgaatttttgggtttaagcgattttttttttttagttttttgagtagttaggattataggtgtatgttatagtgtttagttaaatatttagaattttttttttttttatttttttttggtagagacgaggttttattatgttgtttatgttggtttcgaattgttgtatttaagtgattttttattttggttttttaaagtgttgggattataattattatgtttagtttttagaatattttaaagtagtttattggtttggagaataagttatattagttgttttaaaagaaatattgtatttttttttttttttttttttttttttgagatagagttttttttttgttgtttaggttagagagtaatggcgtaattttggtttattataattttcgtttatcgggtttaagtgattgttttgttttagtttttcgagataggattatagggttatattattatgtttggttaatttcgtatttttagtagagatagggtttttttacgttggttaggttagtttcgaatttttgattttaggtgattcgtttattttaggtttttaaagtgttgggattatagttaggagttattacgttcggttaagaaatattgtattttaaaaatagtttgaatttaattaagtttatagtaaaattttaaagatttttaaggtagagatataatagtgtattattttttttttatatagagggagaaaatttaagtttttatgaattacgattttataatttttatttattttatttatatataaatatatatatagatttataataattattaggtatgttgttatatagtttaggataaaaattagagtagtcgtttcgtagtatatgtttcgatcgtagtgtttatattattttttagaattttttttttattttttattttatttatatgtttgaaataataaattttatcgtaattattatatattttttttatttatttcgtatgatatattttttatataatattgtatagataattattattgagttatattgatatagtttattatatatacgggtggaatatatttattttaatttattaaagaaaatttttatttattattattttttttttattttttattaaaagtagtttataaattaatttttttaaaattatatttaaatattcgtatttttatttataaaaaaagatttattttaagtgtattaatgaattaataaataaattatgaatcgtaagtttattaaaataaagaaatatcgataagtttaattaatagtatataaagaagttatataataatttgattttttatgttagtatatttatttcgtgttatggttatgttaaaattgaaggtttaagagaatttaaaattagttaggcgtagtggtttatgtttgtaattttagtattttgggagatagaggtgggtggattatttgaggttaggagttcgagattagttcggataatatggtgaaattttatttttattaaaaatataaaaatta

SEQ ID NO: 143 - DNA, 5683 bp, Artificial Sequence
  chemically treated genomic DNA (Homo sapiens)
atggtaaatatttgaaaaagtttttacgttgaaatttaaattagattatatttaggatgttttataaggtggtattttttattaagatgataaaggataaatattggtggagttagagaggttgtttttaaatatagttttttttattagtaatattgtagtagtttgtatttatcgtttagagtatgaaaaagatttttgttaaagacggtttttggggatttattattattatatgttaagagtttgttttttatgtttttatttttttattttgttaattttttttatttttatttttcggtttagtgtgagattttattattttttttttttatttttttttttttatatttttggttttttagtaggttaatgtttttgtttttttattggaatttatttattttggttatttttttttttatgaatttgttggattatattttaaagttatttaaaagagggatataaagatataataaaatcggaaataacgtttatttttattagtttgtagttaagagtgtgtggaattagggtggttgtaggtaaagagatagggggaagggttgttttatgttatgggtaggatagtaaatggtgtaaattttttggaaagtattttagtaatataggtgaagagtttttataatgtgtttattttatgatttatttttattttttttattttaaaggaataagaagaggtttaattaaagtatgagtgaaaaggttatttaaatatagggaaaggggtcgttatgatgtttacggttttaagaaatagaaaataataatttggtttaaataataagtatataattaaagaaatttagaagtaggatttttttaagagttgagagatttagtagtttaaaaatgtgatttgatatacgagttttttttatgtttttgtttttttttttttaatattggttttatattaaatttggttttttagtggttaatagtattaaatagtatttatcggtatttttgttggtatttaaaagagatggagaaagtttgattttatatggtttttttttaaaagtaataaaggatttttttcggaagtttttagtaaatttcgttagatttgaattatatgttaatttttaaattagttattggtagggaagtgggaaaaaggggaggaggtgtttatttttaattaatatgtttatttttgtttattgagattaattttataaaagtattgttttagttttttgaagaggagtataatgtttgtgagttatttattatatttatttattaagagttaagggataattgagtaaaatggtagagttggtaggaaaatggtgagtagtttcgtttttttgtgttataattgatttgtatataaagagatttggaaatttaaatataagaattttttttttttaagtttagggttttgggtattttaagtttggtttttgtttgggtatagtggtttacgtttgtaattttagtaatttgggaagttaaggagggtggattatttgaggtgatgagtttgagattagtttggttaatatggcgaaattttaattttattaaaaaatataaaaattagttggatgtagtggtatacgtttggaattttagttatttaggaggttgaggtaggaaaatcgtttgaatttgggaggtaaaagttgtagtgagttgagattgtattattgtattttagtttgggagatagagtaagattttattttattttttattaaaaaaaaattttggtttttatatgtgaaaaaataaaagttaatttttaaaaattaaataataaagagtgttaggtgataagttttatgatagagataatgtgtgttttaaaatatatagtataaaatagatggaaaatattttatggagaagggagagtttgaattggtgtttgattgaaggataagaaaaatttgttggtaatttttttttggttttgatttttgatgtagttaaagtaaagtaatttagaattatgatttagggaatatatttagagagaaatgaatttatgatgtttttaatttgaagatgttatgattttagattattttagaatataatgattttttattgttttatatttgtaagaaatgttttattattgaaaatttgtaatatttaaaaaatttttatataaaattatagtttattttgttgttttatgttaaataaataaaatatttttttttaattatgttgttttttttaattatacgtaattttaaaattagttgtaattgatagttttttttttatatttattgttaatgtatttaggttaattttatttttaattagagaaatttagaaaaaggaaattttacggtgaaatgttatatgttttataatttttagtaattaatttttaaggatgataatttggtaaaaaagagaattggattagttttttgaaaggtttattatttcggtttatgttaattgattgttttaaaattatagtgtttttaggttgtagagatatatttaaaatggattattgtttttatattaaaggggataggtttttttttttttttttttatttttgttttttttaaagttgtatagaggtatatgaggtttggggaatatttgtagtatatgttggttggtaagaatgtgggtgaatttttgttaaggggcgtagatatttttttttttatgattttttttttttatttagaataattgaagtattatgataagaggaagggttttgtgtttgagataagtagtttttatatttgttagttttttttaataagaaagtttttttttgttatcgtataggttatttttttattggtaaagtatgatgaagtttggaaattgttgtttttgttttgttgaaagaagttaagttttaagaaatttgtagaggtatttttataattttttagttatggtagtatgaattttgaaggggtagtgagtgttggtttttattttgtttgtatagttaagtttaggggagataatttttttatataagatgtattttgtttttgtgggttttttgtagtttttaagtttttatttgatttgtatataatgatttagtgggttagaggagtttagagttatgagcggtttatttttttaagaattatttttgattgtttagtattatggagtaagtggaaagaagaaaaaaaaaatttaattatttttcgaagagtaagatgaatgttgtagaaggagaaggaaggggagggagatggatgggtgtcgattttagaatttttagatttgtttggatgaattattatttatgatttgcgggataagaatttgattttatttattaattagtagaaatttttttttttgttttttaatatttgaaatttaataaatatgtgttttaggaatatatcggttattttttagaggtattttatatatatattgagtaattagaaaatatttttttcgtaatatatatatatatatatatatatatatattattttgttatataatatttttacgtaagaaaagcgaaattgttgtttgatgaatgtaaatatttggttgtttgtagtagtcgggagttttgttaggtttaagtgttaagatgggaggtgaattttaggggtttttttttgttcgtgttgagatttttatttggttaagtttttatttatgttttggtttcggagcgagttcgatagcgttggattatagtagagggagcgaggcggttgacgttttatttcgaagagatgaatggaattttaggaagttagagttatgttggtttgggatagtggtttggagattagattttaatgatagaagtattaggtagcggtatttatggtaatgtgtgtatttatagaaatgtaatttatatttcgggtttaggagtcgaaaaatgaaaagaacgtttagggaggaaaaagggaaatataataataggtagagagtaatttattattttatgggtttgttttgtaaatagttgaagattttggagttagatggttttgtaaattttttaaataggagttacgttaagaagtacgagtgggtataaaaattgttttttaagatataattttaatttggtttgtggaaattggatacgagtaagtttttttaaaattcgagtagaaagtagttgtttttttcgggttttttgatgagaatacgtatatcgtttttaagcggtcggtcgagggagcgtcgcggtagcgggagaggcgtttttgtgggttttttggtagtcgcggtaggaaagggttcgaaggtagcgaaggcgaacgcggcgtattaatttgtcggtttcgtcgacgtcgcgtttattttttttcggggcgggcgtggggttagtttaggataggcgttcgggggacgcgtgtttttattttacggggacggtggaggagagttagcgagggttcgaggggtaggtattttaacgaatggtttttttggtgttttttgcgtttcgtcggtttatttttttttttataaaacgggtttagtttttagtatttatttttcgttattaattaggtatttcgggagattagttcgttcgaaagtttttgcgttatttcgcgggtttttttaggtggtttttttagtttcgttttttttcgggatgtttgttgattatttcgagttcgcgtggcgtaagagtacgagcgtcgagttcgtgcgcgttaaggttgcgtgggcgggtatcgatttttttgagaagttttagtgtttttaagtttcgattttcgttttttttattttttagttggaaagttgcgcgttaggtagcggggggcggagagaggagtttagattggtttttatttttcgttttttgttcggtcgtcgtttattggtcggaggaatttttaggaatgcgagcgtttttttaaaagcgcgcggttttttcgttttgttagtcgttgcgttcgagttggtttgcgagtttagggtttttgtcgttttttaggagtaatttttatttcggacgtataggtatttttcgcgtttttttagttttcgtcgttttcgttatcgttttcggtcgtcgcgtttcggtatatataggtaagtcgttttcggcggtcgtcgaggattaaagttgttcgggatatttatttggagcgttgaggttttagtttttttggtggatttcggaatttatatttttttcgttcgtttattttagttcgttttttttagtcgttggaggattttttagggtaaggttttagagttattttttttagttttgaggtttataaattaatttattaggatattttaagatttttttattttttgaagttttttttaagtttttgtattagtattttagggaagagtttgtattttttttgttttttttgtaattttaaattatagtttttgattttgtttattttcgattttttaaaagtttttaaattgttggttttgcgttttttatattttaaaattagtattttttttttttattttttttttttttttttttttttttttttatgttttttggaaagtaattttgttgttttttattttagtaaacgcggggttatagagggatggtttcggttttgtttttatgtttagtttcgtttttgtttatcgtttttttttgtttagttgatttgtgattttcggtttttgtgttttttgttatagg

SEQ ID NO: 144 - DNA, 5683 bp, Artificial Sequence
  chemically treated genomic DNA (Homo sapiens)
tttgtagtaggaagtataagagtcgagggttatagattagttaggtagggagggacggtgagtagaaacggggttgggtatggggatagggtcgggattatttttttatgatttcgcgtttgttgaaatgaaggataataggattattttttagagagtatgagagagagagagagagagagagagagaggtggaggaaagagatgttggttttaaagtgtggggggcgtaagattaataatttgggggtttttgggaagtcgaaggtgagtaagattaggaattgtagtttggggttgtagggagggtaggggaagtatagatttttttttggagtgttgatataaaggtttaaggaggattttagagagtaaggaaattttggggtgttttgatgagttggtttgtgaattttaaggttggagaggatggttttggagttttgttttgaagagttttttagcggttgagaggagcgggttggggtaggcgagcggggagagtgtaggtttcggggtttattagagggattgaagttttagcgttttaggtggatgtttcgggtagttttggttttcggcggtcgtcgggggcgatttatttgtgtgtatcggagcgcggcggtcgggagcggtggcgagggcggcgagggttggaggggcgcggggaatgtttgtgcgttcggagtagaggttgtttttggagagcgataggagttttgaattcgtaggttagttcgggcgtagcggttggtaaggcggaggagtcgcgcgtttttaaaggggcgttcgtatttttggggattttttcggttaatgggcggcggtcgggtaggaagcgggaggtgggggttagtttgggttttttttttcgtttttcgttgtttggcgcgtaattttttagttagaaagtgaagggggcgggggtcggggtttgggagtattagaattttttagaaaagtcggtgttcgtttacgtagttttggcgcgtacgggttcggcgttcgtatttttgcgttacgcgggttcggggtgattagtaagtatttcgaaaagggacggggttggggagattatttaggagggttcgcggggtggcgtaggggttttcgggcgagttgatttttcggaatgtttggttgatggcgagaggtggatattagagattgggttcgttttgtaaaaagaaaaatgggtcgacggggcgtaggggatattaagagagttattcgttaaagtatttgtttttcgggttttcgttgatttttttttatcgttttcgtggggtgaggatacgcgtttttcgagcgtttgttttgagttggttttacgttcgtttcggagggaggtgagcgcggcgtcggcggggtcggtaggttggtgcgtcgcgttcgttttcgttgttttcgggtttttttttgtcgcggttgttagggggtttatagagacgtttttttcgttgtcgcggcgttttttcggtcggtcgtttgggggcggtgtgcgtatttttattaaggggttcggggaggatagttgttttttattcgaattttaaggaaatttattcgtatttagtttttataagttaaattgaaattgtgttttgaaaaatagtttttgtgtttattcgtgttttttaacgtgatttttgtttggagaatttgtagaattatttggttttagagtttttagttatttatagagtagatttatagagtaataaattattttttgtttattattgtattttttttttttttttttaaacgttttttttatttttcggtttttgaattcgaggtgtgggttatatttttgtgggtgtatatattgttatgagtgtcgttgtttagtgtttttgttattgaagtttggtttttaagttattgttttaagttagtatgattttagttttttggaattttatttattttttcgggatgggacgttagtcgtttcgttttttttgttgtgatttagcgttatcgggttcgtttcgaggttagggtataggtagaagtttgattaaataaggattttagtacgggtagggggaaatttttggggtttattttttattttagtatttaaatttggtaggattttcgattgttgtaaatagttaagtgtttatatttattaaatagtagtttcgttttttttgcgtgggagtgttgtatgataagatggtgtgtgtgtgtgtgtgtgtgtgtgtgtattacggaaagagtgttttttagttatttaatatgtatataaaatgtttttaaaagatgatcggtatgtttttaaggtatatgtttgttggattttagatgttgggaggtagaaagaaaagtttttattggttgatgaataaaattagatttttgtttcgtaaattataggtaatgatttatttaagtagatttgaagattttggaatcggtatttatttatttttttttttttttttttttttttatagtatttattttgtttttcgaaaagtaattgggtttttttttttttttttttatttgttttatgatattggatagttagaaatagtttttggagggatgggtcgtttatggttttgggtttttttggtttattggattattgtgtataaattagatgggggtttgagggttgtaagaggtttataaaagtagaatgtattttgtatgaaaagattattttttttaggtttagttgtgtagatagagtagaaattagtatttattgtttttttaggatttatgttgttatggttgagggattgtaggaatgtttttgtagattttttggaatttggttttttttaataaaataaggataatagtttttaaattttattatgttttattaataagaaggtgatttatacggtggtaggaaagagtttttttattagagaaagttgataggtataggagttgtttattttaaatataaagtttttttttttattatgatattttagttgttttgggtggaaaggaaaggttatagaagagggagtgtttgcgttttttaataggaatttatttatatttttgttagttaatatgtgttgtaaatattttttaaattttatatatttttgtgtagttttgagagaagtagggatgggaaaagggaaaagaaaatttattttttttaatgtgagggtaatagtttattttgagtgtgtttttataatttggaagtattgtgattttaaggtaattaattaatatgggtcgaagtgatggattttttagggagttggtttagtttttttttttgttaagttgttatttttgaggattagttattgaaaattgtaaggtatatggtattttatcgtaggattttttttttttaagtttttttaattggaggtgggattgatttaaatatattggtagtaagtgtgaggaaagggttgttagttatagttagttttaaaattgcgtgtaattaaggagagtaatataattgagaaaaaatattttgtttatttagtatagaatagtaaggtgggttgtgattttgtgtaggaattttttaagtgttgtaaatttttagtagtggaatattttttataagtgtgaagtaatgaaaaattattgtattttagaatagtttaaaattatagtatttttaaattgaagatattataaatttatttttttttgaatatgttttttagattataattttaagttgttttattttaattgtattagaggttagagttaggaggaagttattaatagattttttttgttttttaattaaatattaatttaagtttttttttttttatgaggtgttttttatttgttttatgttgtgtgttttaaagtatatattatttttattataaaatttattatttaatattttttattatttagtttttaaaaattagtttttatttttttatatgtaaagattagaatttttttttggtggggggtgggatggagttttgttttgttttttaggttggagtgtagtggtataattttagtttattgtaatttttgttttttagatttaagcgatttttttgttttagttttttgagtagttgggattttaggcgtgtgttattatatttaattaatttttgtattttttagtagagttggggtttcgttatgttggttaggttggttttaaatttattattttaggtgatttattttttttggttttttaaattgttgagattataggcgtgagttattgtgtttaggtaaggattagatttgaagtgtttaaagttttgggtttgggaagagagagtttttatgtttaaatttttaaatttttttgtgtataagttaattatggtatagaaggacgggattatttattatttttttattagttttattattttatttagttattttttagtttttggtgggtaaatgtggtgagtgatttataaatattgtatttttttttaaagaattgaagtaatatttttatggaattgattttagtgggtaggggtaggtatattggttaagggtaaatattttttttttttttttttatttttttgttagtgattgatttaggaattggtatgtgatttaaatttgacgaggtttgttgaaggttttcgggaaaagttttttgttgtttttaaggaagagttatgtgaaattaggttttttttattttttttggatattaataagaatgtcgataagtgttgtttggtgttattggttattggggagttaagtttagtgtgaaattagtgttggaggaggaagaataaaagtatagaaagaattcgtatgttaggttatatttttgagttgttaaattttttaatttttaagggaattttatttttagatttttttggttatgtgtttattatttaagttaagttgttgttttttattttttagaatcgtagatattataacggtttttttttttgtgtttggatggtttttttatttatgttttgattaaatttttttttatttttttagaataagagaagtaaggataggttataggataaatatattgtaaaggttttttatttatattattaagatgttttttagaaaatttgtattatttattgttttgtttatggtatgaggtagtttttttttttatttttttgtttgtagttattttagttttatatatttttaattgtaggttggtaagggtgagcgttattttcgattttattgtgtttttgtattttttttttgggtaattttgagatgtagtttagtaggtttataaagaaaagaataattaggatggatggattttagtgaaggggtaggggtattgatttgttaggaaattaagggtatggaggaaagaagatgggaaaaggagatggtgaggttttatattgggtcgaaagatggaaatggggaagattagtaaggtaggaaggtgaggatatggagaataggtttttaatatgtaataatgataaatttttaaaagtcgtttttggtaaaagttttttttatattttggacgataggtgtaggttattgtagtgttgttgatggggaggattgtatttgggagtagtttttttggttttattaatgtttattttttattattttagtaaaaaatgttattttatggggtattttaaatatggtttggtttgggttttagcgtggaagtttttttaagtgtttgttat

SEQ ID NO: 145 - DNA, 6189 bp, Artificial Sequence
  chemically treated genomic DNA (Homo sapiens)
tttatgaatagattaatgttttttttttggggtgagtgagtttttattgtatttgtttttgtaagagttggttgttaaagagagtttggtattttttttttgtattttgtttttttttttattatgtgatatttttatattttagtttttttttattttttattatgagtagaagtattatgaggtttttataagatgtaaatgtttaattttgaatgttgtagtcgttagaattgtgagttaaataaatttttttttttttataagttatttagttttgtgtatttttttatagtaatataaaatagattaagatatttaaggaattagaatttttagagtgaaggtattaggagttagaattattaaaaagtttttttagtgatttagatgataaattaggttttgggagttattgattttattaataatttatttaatgttagaattttttgaatagaatttttttaaggttttgtttagtatttttagaatatagtaagtttattattttataggatagttttttatggggaatgtgtaacgtgtagggttttgatagttagaggtggagggtaagggtgtttgaggtagagtgaatattagaaataattagaaaatagagggagataagtttggaaggaaaatttggaatttttgtaggaggaaatttgtgttaggatgaagggtttggagagttgattgtaggagtttaagtgaggagtaataagagtttggattagaagtaataggaatggtaaagaggaggaaagaaaaaattgtattgtagggttagtttataaagtttgatgattgggaacgaggatgatttaaagttgatttttggattttgaggttttggagtataaaaatattaattaggatagtgatattaggattaggaataggttgaaaaggtagattataaattagattttgatatttgaaaatgtatttgtttttgttattttcgatattattttattatttgttttagggtagagtttatttatgattttttgtgtatgtttagagattggtattgagtatatttttagaatgtttggtgaatgaagagttattgtaagtgttttttttatttgtgttttttttgttttagtttaggattttattttttatttgaattattgtagatttaaggtttttagtttatattattgtttttgtgtgttttagaataaggtattttttgcgggtttataaattagaaaaagagtttgtatttaaatgagtatagttttttgtttagggtttaggaagtaaagtttatttttgtgggatgataaatatatttttttttgtaggaggaaattttttgtattaggatggagggtttagagagttgattgtagaggtggaattttagattttatttatttttttagttggtatagagtattttggaaatgttttttagttggttaatttgattttgttttgttatatttgtttttttttttttttttagaattattttttgaagtatttgttatttttattttttttagttagagtgattttttttgtaattttaaaatgtaattatattatattatattatattttgttttaaatttttttatgtttttttagtagttgtagtatgaagtttaaagtttttaatttgtaataaaagtttatttacgatagatttttttgagttttttttttagtagttatttttttttattatttttttttttagttgtagttttttgaattgatattgtataaataggttttattgtttttatttttggtttaataggtattgtttttttttagtgttttagatggttagattgtttttcgttttttttagattaaggaagttgtttttgttttaattttagtgtagattagtatttgtttttttgtattttttttttttgtattgatatttaggatttagaattttttaggttgtggagatttcgtttttttgtttgtgatttttttgaggattaaaaatgtgttttgtttgtgtttttttttttagtatttggtttagttttgttgaatggataaatgaaaatttgatttagagataaatgaaaaatgtagattttttttattattaaaaaattttaaaattaaaatttagatattaaaaaatttaaataataataaaatttttaaattaaagaaaaaaaaaaaatttaaatgttttttgtttttttttgaatatgaggtattttgtgagtggttaaagttttttttttttttatattttttgtagttttgaaatggttatttatttaggaggttaatagtttatgggaagataattattttggtttattttatattttgtggttttattttaaggttgatttgttttggtgtgtttatgtatttaatatttgtgagatattttaagaaaaattgttattaggtttggtggttgatgtttataaatttagtgttttgggaggttaaggtaggaggattgtttgaggttaggtatttgtgattagtttgggaaatatagggagtttttataagaaattttaaaagaaattagttagatttggtgttgcgtgtttatagttttagttatttgggaggttgaggtaggaggatcgtttaagtttaggagtttcggattatagtgagttatgattgtgttattttattttagtttgggtaatagagtgagattttgtttttaaaataaataaataaatgtaaatgaaaaaaattgtttatagatttagtaacgtatttgatttttttaaaaataattaagttttattttttgaaaaacgttttgaagatggaggattttgtttatgtgtttgagattgaaaggttagtaatgataattttaatagtgattttatttgtttaaatgttagattagtttagtgatgaattttggaatgtttagatagtttattagaaatttgtgtttgaaatttttagtttggtgtgtgtgtatttttttttataaagaatgtgaagagttgtgaaaacgtgtttaataaaaaaagagataattaagtgtaaaatattatttaaatattaataaaaattataattaggtaaaatatggtagtaggacgataagataataaaaatgagaggtgtgttatttaagtgttagtttaaatgtgggtagagatgattttgtgtaaagatttttttttttcggagttatgatattaatattgagaagaaatgttgtttaaggtataagtatgtgtatggtaaatgtttattttttttatttttttgatagtaatttaaaaatgttatttacgatttttagtatgaatagtttttattatttttttagtttatttttagtttttaatagtatttatggttttttttttttttgttgtgatttttagttattttttgaaaattgacgagtaaatagttattgattttaatatttttttatgaagaattattatataagaattgggttttatatattgattttttttttagtttttttttttatattttgtatgtaatataagttttgtttaagggaataattatgataaatatgtttggatataatttgatttttagttttggtttggagtttatgatattgtgttttagttattttattttttagataaaatttaaattttttaatattagtatgtttttttaatgtaaggtataattattgtagtgaaggtattaatttatattttaattgattaatattgtagttataaatgtattttatattttttataaatttttttttttaagtatgttttatttttattttttttgtgaagtggtataataatttatattgttaatatttaaaatattttttttttttttttttatatatttgttgggtgttttatggggagttgagagagatatatttggttataaagagagataatttcgttttaaatagtttttttttagtatttttatgttgtttagtatagtgttaggtttatgtgatgtatttagtaaatatttgtttatttgaattttatattataagtaattttattatttattttattttattgtttattttagtggtaaagggtatttggtgtttattgatagaatatttttattttttaagttttgaggttagttacgattttaaagaaagaaataatttttaaagtttatttatatttatttatttgtttatttatggaaaaattatgtacgggaaaaatgtgaagtggaaggaaaggagataaggatatttttttgttttttttttggtatgtagaaaattaattatataattgtttattgaatttgttttaaagggttaaatgagagaaagattgtaagtttatttaatatagtgtttgatatatagtaaatgtttttaaaaggtagtttatttttatgtaatagattataattaaggattttttttttatttttgtatgatttagtgttttatttttttgttttgttttttttatttaagaatgatttgtgtgtgttttttttttgaatttgtgagaggggtttaatgtttagttatatagtaaagtgtagataagaattttgggttagtattttttttaaattttttttatgatttaagatattttggggaagggatatatgagttgttatattaacggatgatgatttttatttttattaagtgatttataatttgttattggtgtaataagttaagaaaatagtatatttttatgattgttattttatagttatttaaattagaattggaatgttataaaaataattttttgttagtttagaggaaaaaaaaaaagaaagaaagtaaaggggaaatttagattagttataaagaagttttttcgtttgtttgtaaaagttgtagcgttaaaattgagagagttcgttttgtttttttaatcgttttttatttttggttttgggatttttgtttattttttgattgataggttttgttttgtttttatttttttttttttggggaaaattttagttttatcgtacgttttttttttttatatttttattttttttttatttagattgtgaagatggaaagggtttaatttttggaagagaatgtgggaaatgtagttaggttaagattcgagaggaataagttattgttggtggtttttgtaatttagggattggggttgtttttgtgttttatttatatttgtttgtatttttttgttttttaggtaagatgtattattgggcgttgtttttttattagtttatgttgatggtagttgtaatagttgtaaatagtcgtttggaaataattttatgttaaaagtgttgagttttttttttttttttttatagtaatcgtaaagtgtggttaaacgtttttttgttttttttttttttttttttttttagtagtggtagtggtagggtagagtggaggtagggtagaggtatagtttttagatttttttttttttttttgtaatgtaagattttttgtatttttttataagttgttattttgaagttttgagttattgatatatttggtttatttattgtgatagtaatgtgtttgattaggtaattaatattaaaaggaaataggaaagagattagttttatttttttataatatttatatattttatagatttgtaaggtgattttttttgtaaagaatgttgaaggtattaatattaatagcggagtaatgtgtgcgtgtatgtgtgtgtgtttatgtgtttatttatttattttaatgatttaattagatattgttttttataatttattttttttagttataatttaaagatattattttattttttttttattttattaaatatattatgtagtaggagattatttttttagtattttttttatatagttaaaatatttttattttttttttattttatttttgttttatattttttttttttgtattatttttttttatttagtagtttagatatataaatattattaggtatttaaggatgttttttattgtagaagatgttattggagaaaaataaatttatatttttttcgtgtttttttgttgagttagtttgataattttgttttttaggtggttgttttgggttagaaatgtttttttttgataaagtttaggtaatataaattgatttttgatggttttgtttgagattaagtatttttaatgaaattagaatgagatgagtagttttggta

SEQ ID NO: 146 - DNA, 6189 bp, Artificial Sequence
  chemically treated genomic DNA (Homo sapiens)
tgttaagattgtttattttattttggttttattggaggtgtttaattttagataagattattagaaattagtttgtattatttgaattttattagggagaaatatttttaatttaaagtaattatttagaaaataagattattagattagtttaataaaggaatacgaagagagtatagatttatttttttttagtggtattttttgtagtgaagaatatttttaaatatttaataatgtttgtatatttgaattattgaataagaaaaaataatgtaaaagagagaagtgtggaataagaataaagtgaaagaaaaatggaaatattttaattatatggggaaaatattagaaggataattttttattatatgatgtatttaataaggtagggaaaaggtgaaatgatgtttttaaattatgattggaagagatagattgtgagaaataatatttgattaaattattggggtgaatgagtgagtatataggtatatatatatgtacgtatatattgtttcgttattaatattgatatttttagtattttttataaagaaaattattttgtaggtttatagggtatatgaatattatgggaaagtggaattggttttttttttatttttttttaatattaattgtttgattaaatatattattattataatgggtagattaggtatattagtgatttaaagttttaaagtgatagtttataaagggatataaggaattttgtattgtaaagaaaaagaaaaagatttagaagttgtgtttttgttttatttttattttgttttattattgttattgttgaaaagaaggaaggaaaggagagatagaagggcgtttaattatattttacgattgttgtggggagagggaaaaaaaatttaatatttttggtataagattatttttaagcgattgtttgtagttgttgtagttgttattagtatgagttggtgggaaaatagcgtttagtggtgtattttatttgaagagtagagaagtgtaggtagatgtaggtgaagtataggagtagttttagtttttgaattatagaggttattagtaatagtttgtttttttcgaattttggtttggttgtattttttatatttttttttaggggttggattttttttatttttataatttgggtagagggaagatgaagatatggaaaaggggaacgtgcgataaaattgaagttttttttagaaagaaggaggtaaagataaaataaagtttattaattagaaaataggtaaaggttttagggttagagataaaaggcgattgaaagagtaaagcggatttttttagttttaacgttgtaatttttgtaggtaggcgggggaatttttttgtgattaatttgaattttttttttatttttttttttttttttttttttttgggttaatagggagttgtttttgtgatattttagttttgatttgagtgattgtgaaatgatagttataaaagtatgttatttttttaatttattgtattagtaataaattgtgggttatttggtaaagataaaaattattattcgttaatgtagtagtttatatattttttttttaaggtgttttaaattatagaaaagatttaggggaaatgttggtttaaggtttttatttgtattttattatgtaattaaatattgaattttttttatagatttagaaagaaagtatatatagattatttttgaatgaaaaagataaaataagaaaataggatattgggttatgtagaagtaaaggagagatttttggttgtagtttattgtataaaaataaattattttttggaagtatttattatgtgttagatattgtgttagatggatttgtaattttttttttatttaattttttgaggtaaatttaataaataattatatgattaattttttgtatattagaaaagaagtagaagggtatttttgttttttttttttttattttatatttttttcgtatataatttttttatgaatgaataaatgaatagatgtaaataagttttgaagattatttttttttttgaggtcgtggttggttttagaatttggaaagtaagagtattttattaatagatattaggtattttttattattaaaataaataatgaaatgaaataaatgataaaattatttataatgtaaagtttaaatgggtaaatatttattgagtatattatatgagtttggtattgtattggataatataaggatgttggggaaaagttgtttaagacggaattgtttttttttgtggttaagtatgttttttttagttttttatgaggtatttagtagatatgtaaagaaaggagggagaaatattttggatattgatagtatgagttgttatattattttatagaaaaaatggaaatgaggtatatttaaaagagaaagtttgtgggaaatgtaaagtatatttatgattatagtattaattaattaaaatatgaattaatatttttattataataattatgttttgtattaggagaatatattggtgttgagaaatttaagttttatttgaaagataaggtaattaaggtataatattatagattttaagttaaaattagaaattaaattgtatttaaatatatttgttatagttatttttttgaataaagtttgtgttatatatagggtgtggagaaaaaagttgaaggaaaaattagtgtgtaaagtttaatttttgtgtaatagttttttataaaagagtattaaaattagtaattatttattcgttaatttttaaaaaatgattaagagttatagtaaaaaaaaaaaaagttataaatattattggaaattagaaataagttgaaaaagtagtaaaaattatttatgttgaaaatcgtagataatatttttaaattattgttaaaagaatgaaaaaaataaatatttattatgtatatatttgtattttaagtagtatttttttttagtgttaatattatggtttcgagaaagaaaaatttttgtatagagttatttttatttatatttaggttaatatttggatgatatattttttatttttattgttttgtcgttttattattatattttgtttagttgtaatttttgttgatgtttaagtgatattttatatttaattgtttttttttttattgaatacgtttttatagttttttatattttttgtgggaagagatatatatatattaggttggaagttttaggtatagatttttgatagattatttaggtattttaaagtttattattgggttagtttagtatttgaataaatgaaattattattagagttattattgttgattttttagttttaggtatataagtagagttttttatttttaaaacgttttttaaaaaataaagtttaattgtttttaaaggggttaaatacgttattaaatttatgggtaattttttttatttgtatttatttatttattttagagatagggttttattttgttgtttaggttggagtagagtagtataattatagtttattgtaattcggaatttttgggtttgagcgatttttttgttttagttttttaagtagttaggattatagatacgtaatattaggtttggttaattttttttaaaattttttgtagagattttttatgttttttaggttggttataaatgtttagttttaagtaatttttttgttttggttttttaaagtattgggtttataggtattagttattaagtttggtggtaattttttttaaagtattttataaatattaaatatataagtatattagagtaaattagttttaaaataaagttataggatgtaaaataaattaaagtaattatttttttatagattattaattttttaaatgaatagttattttaagattatagaaaatatggaaaagaaaagggttttgattatttataagatattttatgtttagaaagaagtaaaaaatatttgggttttttttttttttttggtttgagggttttgttgttgtttggattttttggtgtttgggttttggttttggggttttttggtgataaaaaaaatttatattttttatttatttttaagttagatttttatttgtttatttaataagattgagttaaatattagaggaaaagatataaataaaatatatttttagtttttagggaggttatagataggaaagcggaatttttataatttggaaagttttgggttttaggtattagtgtagaagggaagggtgtagggggataggtgttaatttatattggaattaggataggaatagtttttttgatttgggagaaacgagaagtagtttggttatttggggtattggggaggggtagtgtttgttgggttaggagtgagggtagtggagtttgtttgtgtagtgttagtttagggaattatagttgaagaggaagatggtgaaggagagtggttgttggagaagaggtttagaagaatttgtcgtaaatggatttttgttataagttaaggattttggattttatgttgtagttattggagaaatatggagaggtttgaagtagaatgtgatatgatatgatatgattatattttagaattataaaaaaaattattttgattgagggaaatagaaatggtaggtattttaggaaataattttaggggggggaaaagagatagatatggtaaggtaggattaagttggttaattgggagatatttttagggtgttttgtgttagttgagggaatgagtgagatttaaaattttatttttgtagttagttttttaagttttttattttggtataggaagtttttttttgtaggaagggatatgtttattattttataaaggtgaattttgttttttaagttttgaataaagggttgtatttatttaaatgtaggttttttttttaatttataaattcgtagggggtgttttgttttaaaatatataaagatagtggtataagttagggattttgagtttgtaatgatttaagtgagaaataaggttttaaattaaagtagggaggatataaatggagaagatatttatagtggttttttatttattagatattttgagagtgtatttagtgttaatttttgagtatatatagggagttatagataaattttgttttgggataagtgatagagtgatgtcggaggtgatagaaataaatgtatttttaaatgttaaaatttgatttgtaatttgtttttttaatttatttttgattttaatgttattgttttggttaatgtttttgtattttaggattttaaaatttaagaattaattttgaattattttcgtttttagttattaagttttgtaggttagttttgtaatgtagttttttttttttttttttttgttatttttattgtttttaatttaaatttttattattttttatttgagtttttgtagttagttttttaagttttttattttggtataggtttttttttgtaggagttttaagttttttttttaaatttatttttttttattttttgattatttttaatatttattttgttttaaatatttttattttttatttttgattattaaaattttatacgttatatattttttatgaagggttgttttgtgaggtagtgagtttgttgtgttttagaagtattaaataaaattttgaagaaattttgtttagagaattttagtattgagtagattgttgataggattagtggtttttaaagtttagtttattatttgaattattaggagaattttttaatgattttgatttttaatatttttattttagaaattttgattttttgggtgttttagtttattttgtgttgttgtaaaggaatatataaggttgggtaatttgtaaggaaaaaaaggtttatttggtttataattttgacggttgtaatatttaaggttgaatatttgtattttgtgagggttttatggtgtttttatttatagtggaaggtaaaagagagttagagtgtggagatattatatggtaagagagaaagtaagatataagagagaggtgttaggttttttttaataattagtttttgtaggaataaatatagtgagaatttatttattttaaaaggagggtattaatttatttatgag

SEQ ID NO: 147 - DNA, 7057 bp, Artificial Sequence
  chemically treated genomic DNA (Homo sapiens)
ttgaagagcggtagcggaaatagttgggaaaagtggttttttttttttttttttttttttttagtggattatttgttagtagtagtatttggttttggtttttagtttaaagttatttagagagggttttaggaagggtgttgagatttttataatagataggaggataaaattaaaaggaaaattaatattagttaagagtgaaattttttataaggttttatttttagagaaaagttttttttattttattagttgtgggggtttttggtttttttgtttttttatttatataatttaaagggaagtttgattgttgatattttttatttatttaaatagaatttatagttagtttttttatttcggagagaggtttgtggggaaaatagatagattaatataattgtagaggaaatttatgttatttatttataataattaatacgggtttttatttataaataaataaatggttaagtatttgagaaaaattagtaatataatgaaaaggattaaaataaataaatggaattgatttagaggaaagagggagaattaagggaattgaagaaaatgtaaatatattttgatatgtattgttagaaaagttagttaagcgttatttttttaggttagaatattttataatttttttttttatttttttaaaataatatttagtaatttggtaaatatttattaattttttataatgtgttaggaattaaaatttttgggtttttttgtttgtttgtttgttttaattattttttttttttaatagttaatggtagaaaaattagataagtttattatgatatgatgtggtaaatgttatgatagattaagtatagaagaggtagggtatagtggtttacgtttgtgtaattttagtattttgggaggttaaggtatgtggattatttgaggttaggagtttaagattagtttggttaatttggtgaaatttcgtttttattaaatttataaatattagttaggtagagtggtgtacgtttgtaattttagttatttaagaggttgaggttggagaattatttgaattcgggaggtggaggttgtagtgagttaagattatgatattgtattttagtttgggtgataaagttagatttttttttaataataataataataaaaagattaagtatagaagagagtattttgttagttggaatagaatattttatttaaatattaatagatagtcgggcgttgtggtttatatttgtaattttagtattttgggatatcgaggttggtagattatgaggttaggagtttgagattagtttagttaatatggtgaaatttcgtttttattaaaaaaattttgtaaaaattatttaggcgcggttgcgtaagtttgtagttttagttatttgggaggttgaggtaggagaatcgtttgaatttgggagatggaggttttagtgagttgagatcgtgttattgtattttagtttgggcgatagagtgagattttgttttaaataaataaataaataaataaaaaatattaatagataagataggagagaattagttttggtatataaataatatgaataagtatagtatattttaggaaataaaattagtttaaaatgtttgagatttaatgagtcgtagacgatgaggagagaaatgtgggtaggggttaatttatttgttatgttaagaatcgagatttttttttttagtttagagttttttaggtatatttagggaaaagaatttttaggaggttttttatataataaataaaatattgttatatttaatttttttatatgtattggaaatgattttttaagtagaaattatgattgtgttttgggttattaatataaaattataattataggtatatttatattaaaaataaattgttgaagtatgatttattgttttttttattttttttttgatatttgttataaattaattattagttagtagaaaagtagtagtagaaaagggtgattaatatttaagaaaattttgtgtaaaaataattgaaaaatgagattttaatttattaatttaattttttttgtaaatttagaaaaagatggttaatatttgattttggttatagatatttgtatgtatttttatatatgtatatattttttggaaattaagtttgataattatttttggacgtgttaggtagttgaagatattaaaacggagttaattttttgttagggagagataggtatgagaggttttgagataaagaatttttgatgtagaattagaaattaaaaaaatagtttaaatgaggaagttggaaaggtagttaattgtggtattatggtagaggattaggtagaaggatgagagaaagagaaggttttaataattgaggtataagtagggtattttggagttagttgttgttagtgtgaaagatggatggggtgggatagaaagagaaatagggagataagttaggatggtataatttagtaatttataaaggagaggatatatgggtttggaataggatgatggtaggggttatggagagaagtggtggtaattaaggtttttggaggaagaagttattgggattggggtaatttggggtaagagagagtgaaaaattatgaatggattttagatttttgatttgggtaattaagtgggtggtgggattatttatagagatacggagaattttaagggagaataggtttggattggaattagagtggtgagataaattaattttagagtatattaaatgtaagatggttttgggatatttaagtagagatttttagaggtagttgtgtttataattttgaagtttaggattttagttatagatttgagatttattataatgaaggtgagattgaaatttatgaaagtttatgaaatttatgaattatttaatgaaattatggagaataagaagagaggggaggagaggagaagggagaaggaaaggaaatagagagaaggaatattaaagttttaagggatataaagaggaaagaagataatatgaagaaggattttgagaggtagaagtttttaagaatagggtgatatagaatttaagtggggagagtatttaggaagatgataataggataataggttaatagagtaatagagaggtcgttaaaaataaattttaagaagtatttagttaaaattattattgagttaataatggtgggattaattttaggggaatattgtgggtagaagttagattgtaggaggttggggattaagaagttgaggtaaggaggttggataataattgtttttttaagttggttacgtgaataaatttgtgatttttagttttttttttttcgggttttggttgagttgattgtagggtttttgtagttttggtatttttaagttgtataaaattgatagtgtagaagtttttgagtttattttggtttttatgataatttttttttagtggaattaaggttatttgtttaagaattaaagtttttgatttgattgattaaagtttattacgtgtatcgaagttatttatttggtagatgtagtgaaaagttatatagatttgggtttaggataggatgttggggcgtgggaggggaagaaagtaggtgttaattatatagatagtatgtttattagagtagtttttacgttttttatttgttttttaaaataattttataggaattattaaagtaattttattatggtttttagattaggtttggatgtgaggtagggatttttatagttgtttttagtttgaaggaaatttgataagatgatgtaaaagttttttagaaatgtgtaattttatatattttagtgatttaatttattgttaaaatttaaggtgtttttaatattgttattgtttatttggtttttattaatatgtaaggagttggtaattatttgttaaatttatgttttaggttaaataaattttaaaaaatttaggatgagaattgtttattgtttaacgtgttttaaattttttttatgtatatttttattagatttttatagtaatttataggataagtaagataggtgtaagtgttttttttgggtatgaggaaattgaggtttaaagagatgaagtgatttgtttaaggtttatagtaatttattggtagagtaaagattagaatttagattttttaattgtagtttattttttttattttgaattgttatattagtattaataattatttaatggattggaatagtgtatataggtagtttagttacgttaagttacgatttttattttaattttaattttagagttttggtttgattttttttaagattttatttatttttgtttttgtaaaatttattttttttgtattatttttttagttaaattttatttaataattattagtatgttttttttgttttatgttatgtagatttgatttgaaaatttgttaggtttttattgagtttagtgattaaagaagtaaagttttgagaagtaattagttgatgggatattagttataaaattaatttaaatttttgttgatatgtgtttttttttttatatattaggttttcgtttcgtattagtaagattgaaattgaaataagtttattgttggtggatgaatttgttattttttttgaaattggtgaatttaaaaagttagatagtgataggaaaatattgttattgtttgttaagaagtttatgatattttaaggtaagaatgaatatatggaagaagaaatttgttttttttttatttataaaaaggaaagtttggaagtgaatgatatgggtataattaaaaaaaaaaaaaaaaataaaaaatttttacgtaacgtttttgttgggagagaagattacgaagtatattttttaggaagtgtgggttgtaacgattgtgcgtttttaattaattttgagtaaggtggttattttgatagtttttttatgttgtttttgttattttttttgttagaagatattattttaattttaatatagtatgatcgaaatatataattaaattttttttcgatttgcggttattggattgtttattagtatgaaaatttttatgtatttatttattgttttttttattatttagatgattgggttagtattttttgttgtgtatttttatagaaggttggataaggtaagatgaattataagtttttattaattaaatttggggtttttattaatttataggttggttttatttaaatgatggatgatggtagaaattaaatagaagaatggttttgtggtataatgtttgttgtttagttaatgaagttttatatttttgtttttggttaggattttgggatttggagttagattgtttgggtttaaattttggttttgtttatattatttttgttattttggggtaagtgttttagtttttatatttgagaaatggggatggtattggtgtttattttatagattaagtgagtttagttttgtaaaaagtttaggagggggtttgatatatagtaagtattatgtacgtattagttataattatttgttaaagttttgttttaaaagtaagttatttttttatggagatagttttttttttttaaatttttagttaggtaagaagagcgttaatttgatttaaaattttataatgttttagattaatatagatatggataagttttagaatttgtagttttttagtaaaagtagtattttttgtgtaattttttataagtattgattgtagttgtaggatgtttagtttttttttgagatgttttatatttttaaatggttagatttgtaggaataaaagagtagagtaatttagtaggttgttttgtatttttaggaaaagaaaattattaggatttattttgtttttatgtatttttttatttttattgaggagtataattggttggtgttgataaaatattaattatagatgtaaaggagaaagttgattagttttttggttgtttttaaaattttggatgtaggaattgtggttagaaagtatttggatgattgtattttattagggatatttgagtgtttttttttaggatttggatttagaattaatgttatgagatttttttaataggataaggtgaggtagtgagggttgaagttatttattgggttatttaaatattaggttttattgttgataaaagagggggtttttggtttggttggttatttgtgtttggtttgatgtgttttgttaattaaatgtatggatataggtttagtttttaaaggggtaatagtgattttagtggattgatatttatcgtattatttatatgtgtttttaattatagtagaagttgttagttaattgaattttgttttgaatttaaaaaatttatttttaaagtaagaaaatggtataaaattagttgataatgtaagtgaattttgtatatttaattattttaagatattggaaaataaaatattttgttattttgaggataaaagatgatttttttaaaaatgtaaatgttttttataaatattaaagttaaaagggagagagatgtaattagaattcgttaattgatatattgtaaattaatttttttttataaagtattgtattataaatattaaaatgaagtgggtaaattagttttgtagaaaattattttttaggttgatgtttataatgattaattattattgaagtaatgagaaatgtgataattatagaatattgttgttatagtatgttgaaaaaatatgtattttgtagtgaatatttagtagaatagttttgatttttatttggagtttttgataatatgatattttaattgttgttttttatagatttttaaattgtaaatataaaatagtaattagttaatataataatttattattttttatttatgtttgaaagttttttttttgttgatgtcgtggaaatgaatgtagaggtagatattattagttgtatttttttttcgaatgatatttattatatttttgttattttaaaataga

SEQ ID NO: 148 - DNA, 7057 bp, Artificial Sequence
  chemically treated genomic DNA (Homo sapiens)
tttattttggaataataaggatatgataaatgttattcggaaggagaatatagttaatgatatttgtttttatatttatttttacggtattaataagaggaggatttttaggtataaatggagaataataagttattatattggttgattgttattttgtatttgtagtttaaaaatttataaaagatagtaattaagatgttatgttattagaaattttaggtagaaattagagttattttattaaatgtttattataaaatgtatatttttttaatatattatagtagtaatattttgtaattgttatattttttattgttttagtaatgattggttattataaatattagtttagaaaatagttttttgtagagttaatttgtttattttattttagtgtttgtgatgtagtgttttataaaaagaagttaatttgtaatgtgttagttaacgagttttaattatattttttttttttttaattttagtatttgtagaaaatatttgtatttttaaagaaattattttttatttttaaagtaataagatattttattttttaatgttttagaataattaaatgtatagaatttatttgtattattaattaattttatattatttttttgttttaagagtagattttttagatttaaaataagatttagttagttggtagtttttgttgtaattaagagtatatgtaaatagtacggtaaatattagtttattgaggttattattgtttttttagaagttaggtttatgtttatatatttgattgatagagtatattaggttaaatataaataattaattagattagaagtttttttttttgttagtagtgaaatttaatatttggataatttagtggatgattttagtttttattattttattttattttgttagaaaaattttatgatattaattttaggtttagattttaagagaggatatttaagtatttttgataaagtgtaattatttagatgttttttagttatagtttttgtatttagaattttaggaatagttagaaaattaattaatttttttttttatatttatgattggtattttgttaatattagttaattatattttttagtggaagtgaaaaaatatatgaaaataaaataagttttgatggttttttttttttaagaatgtaaaatagtttattaagttattttgtttttttgtttttgtaagtttaattatttaaaaatgtaaaatattttagagggagattgagtattttgtaattataattagtgtttgtgaagaattatatagaaaatgttatttttattaaaagattgtaaattttgggatttatttatgtttatgttaatttgaagtattatgaaattttagattaaattgacgttttttttgtttagttggaaatttaaaagaaaaaagttgtttttataaaaaaatagtttatttttaaagtagaattttagtaaataattatagttagtgcgtatatagtgtttattatgtattagatttttttttaagttttttataaggttaaatttatttaatttatgaaatggatattaatattatttttattttttagatgtggaaattgaggtatttgttttaggataatagagatggtatgggtagagttaagatttgaatttaggtagtttgattttagattttaagattttaattagagataagaatatgagattttattgattaggtaataaatattatgttataagattatttttttatttggtttttattattatttattatttgggtagaattaatttatgaattagtaaggattttaaatttagttaataaaggtttgtggtttattttattttgtttaattttttatgaagatatatagtaaaaagtgttgatttaattatttgggtgataagaaaaatagtaagtaaatatataaaaatttttatgttgatgggtagtttagtggtcgtagatcggggagaagtttggttgtatgtttcgattatgttgtgttaaagttgaaatggtattttttggtagagaaggtggtagaggtagtatgagaagattgttaaagtggttattttatttaggattagttaagagcgtataatcgttgtagtttatattttttggaaaatgtgtttcgtagtttttttttttagtaaaaacgttacgtaaaggttttttgtttttttttttttttttaattatatttatattatttatttttaggtttttttttttgtaagtaaagaagaaataagtttttttttttatatatttatttttgttttgaaatgttatagattttttaatagataatggtagtatttttttattattgtttaattttttgggtttattagttttaaggaaagtgataaatttatttattagtaatagatttattttaattttaattttattaatacgaagcgggaatttggtatatggagaaagaaatatatgttaataaaagtttggattgattttatgattggtgttttattaattaattgttttttagaattttatttttttaattattaaatttaatgaaagtttggtaggtttttaggttaagtttatatggtataaagtaaaaaaagtatgttgatggttattaaataaaatttagttggaaagataatgtaagaaaaataaattttgtaaaggtaaagataagtagggttttgagggaaattaggttaagattttggaattgaagttaaagtaaaaatcgtgatttgacgtagttaagttgtttgtgtatattgttttaatttattagataattgttgatgttgatgtaatagtttagaatagggaaaataggttgtagttaagagatttgaattttagtttttgttttattaataaattgttatgagttttgggtaaattattttatttttttagattttagtttttttatatttaaaggaggtatttgtatttgttttgtttattttgtaggttgttgtgaagatttaataaagatgtgtatggaagaaatttgaaatacgttaagtaataaataatttttattttgaattttttggaatttatttagtttaagatatgagtttaataaataattgttaattttttatatgttggtaaaaattaaatgaataataataatattaaaaatattttaagttttgataatgaattgaattattgaagtgtgtaggattatatatttttgaagggtttttgtattattttattagattttttttaaattaaaagtagttgtggaaatttttattttatatttaaatttggtttagaaattatgataaaattgttttgatgatttttataaaattgttttgagagataaataggaaacgtaaaaattgttttgataggtatgttatttatatagttagtatttgtttttttttttttttacgttttagtattttgttttgggtttagatttatgtagttttttattatatttgttaagtaggtggtttcgatgtacgtgatgaattttgattagttaagttagaggttttggtttttagataagtaattttagttttattgaaggaaaattattatgagagttaaaatgggtttaaggatttttgtattgttagttttatataatttgagagtgttagagttgtaggggttttgtaattagtttagttaagattcgagggaggggaggttgaaggttatagatttgtttacgtgattaatttgaaaaaatagttgttgtttaatttttttgttttaattttttgatttttagttttttatagtttgatttttgtttataatatttttttgaaattgattttattattattagtttaataatagttttggttgaatattttttagagtttatttttagcgatttttttattattttgttgatttattattttgttgttatttttttgaatgttttttttatttgaattttatattattttatttttaagggtttttgttttttagaatttttttttatgttatttttttttttttttgtattttttaaaattttggtattttttttttttattttttttttttttttttttttttttttttttttttttttttgttttttatggttttattgggtgatttatgggttttatgaatttttatgggttttaattttatttttattgtgataaattttaaatttataattgaagttttgaattttagagttgtaagtatagttatttttgaaaatttttatttggatattttaaagttattttatatttggtatgttttaaaattaatttattttattattttaattttaatttagatttgtttttttttaagatttttcgtatttttgtgaatggttttattatttatttaattgtttaagttagagatttgggatttatttatgattttttatttttttttgttttagattgttttaattttagtggtttttttttttaaaaattttggttgttattatttttttttatggtttttgttattattttattttaggtttatatatttttttttttgtagattattgaattgtattattttaatttatttttttgtttttttttttgttttattttatttattttttatattgatagtaattgattttagaatgttttgtttgtattttaattgttgaagtttttttttttttttatttttttgtttggttttttattataatgttataattggttatttttttagtttttttatttgggttgtttttttgatttttgattttgtattagaagttttttgttttagaattttttatgtttgtttttttttaatagggagttggtttcgttttaatatttttagttgtttaatacgtttaaaaatgattattaaatttagtttttaagaaatgtatatatgtataggagtgtatgtaagtgtttatagttaaaattaaatattgattatttttttttaagtttatagaaagaattaagttaatggattgaagttttattttttagttatttttatatagaatttttttaaatattggttatttttttttattattatttttttgttagttagtgattgatttgtagtaaatattaagggaaaaataagaaaaataatggattatattttaatagtttgtttttgatgtgaatatgtttgtggttgtgattttatattgataatttagaatatagttataatttttgtttggaaaattatttttagtatatatgaaagagttaaatataatagtattttgtttgttgtatgaagggttttttaagggtttttttttttgaatatatttgaaaagttttagattagaggaaagggtttcgatttttaatatggtagatgagttgatttttgtttatatttttttttttatcgtttacgatttattaggttttaaatattttaagttagttttattttttgaaatgtgttgtgtttatttatgttatttgtgtgttaaggttaatttttttttgttttatttattaatgttttttgtttgtttgtttgtttgtttgagataaagttttattttgtcgtttagattggagtgtaatggtacgattttagtttattgaaatttttattttttaggtttaaacgatttttttgttttagttttttaagtagttgggattataggtttgcgtaatcgcgtttggataatttttataaaatttttttagtagagacggggttttattatattggttaggttggttttaaatttttgattttatgatttgttagtttcggtgttttaaagtgttgggattatagatgtgaattatagcgttcggttatttattaatgtttaagtgaaatattttgttttagttgataaggtgtttttttttgtatttaatttttttgttgttgttgttgttgagaaggagtttggttttgttatttaggttggagtgtagtgttataattttggtttattataatttttatttttcgggtttaagtgattttttagttttagttttttgagtagttgggattataggcgtgtattattttgtttggttaatatttgtaaatttagtagagacggggttttattaagttggttaggttggttttgaatttttgattttaggtgatttatatgttttggttttttaaagtgttgggattatataggcgtgagttattgtgttttattttttttgtgtttaatttattatagtatttgttatattatattataatggatttgtttgatttttttattattagttattagaggaaaaagataattaaaataaataaataaataaaaaaatttagaaattttggtttttgatatattgtaaggagttagtaaatgtttgttaaattattaaatattattttaaagagatagaaggggaagttgtaaaatattttaatttgggagaatagcgtttggttagtttttttagtaatatatgttagaatatatttatattttttttaatttttttaatttttttttttttttttgggttagttttatttgtttattttggttttttttattatgttgttagttttttttaaatgtttggttatttatttatttatgaatgaaaattcgtgttggttattatgggtagatggtatgagttttttttgtaattgtgttgatttatttgttttttttataaattttttttcggaatgggagggttgattgtgggttttgtttaagtgggtaggaaatgttaatagttaggtttttttttaggttatgtgggtggagaggtaggaagattagggatttttataattgatgaagtaaggagggtttttttttgggggtggagttttgtagaaggttttatttttgattaatattggttttttttttggttttgtttttttatttgttgtggaggttttagtattttttttagagttttttttaggtaattttagattgagggttaaggttaaatgttgttgttaataaatggtttattgggggaaaggagagagagggagagggttattttttttagttgttttcgttgtcgttttttaa

SEQ ID NO: 149 - DNA, 6004 bp, Artificial Sequence
  chemically treated genomic DNA (Homo sapiens)
gtgtaaatgatttttagtagaattgtatagattggaaagtggttagaggttaggttaagttattaagtgatttaggtgggaaggtttaggttttttaggtatacgatatggatttatatttaaatttaggtatttttttttttaagttttttgttaggtggattaagttggtggtttttttttttgagtttgtttatagggaaaatagaaataatagtatgatttattttatagggtttttgggaaggttagaaaaggtgaaatttgataagtgtttagtataggattaaatttttaattgcgtatgggttttttggttggttgtgtttcggtattatttaaattatattacgttgagtttgtgtgcgtacgttcgcgtttgtgacgcgtgtaagtgtgtttacgaaagaatatttttgaagtaaaatttttggattaaagggaaggtgtattttggtgtattgatagattttaataagttgtttttttagaaagttggatttattttagtttttagtttttaggtttgaggtttttttttatttacgtatttgttgagtagtgaattattaaatattttgattttttattaaattataggtgataagataaagtgtggttgggtatagtggtttatatttgtaattttagtattttgggaggtttaggtgggtagattattggaggttaggagtttaagattagtttggttaatatggtgaaattttatttttattaaaaatataaaaattagttaggcgtggtggtgggtatttgtaattttagttatttaggaggatgaggtaggagaattgtttgaatttgggaggcggagattgtagtgagtcgagatggcgttattgtattttaagttgggcgatagagggagatacgattttaaaaaaaaaaagagagagagagagagaaagaaaaattgtgttttacggagtttttaatttttaatttttttgtggtgaacgagatttagttttataagtagttgtattttttttatttatttatttttttaagatagattttttttttgttttttaggttggagtgtagtggttagattttagtttacgataattttcgtttttcgggtttaggcgatttttttgatttagtttttcgagatagttgggattataggtgttcgttattacgtttagttaatttttgtatttttagtagagacggggttttattatattggttaggttgggtttgaatttttgattttgtgattcgttcgtttcggttttttaaagtgttgagattataggtgtgagttattgcgttcggttaagtagttgtatttatttttatgagttggttgtttttgttttattttgggatttttttaagatatttcggttttttaaagtgttgagattatatgtatgagttattttattttattttttttttttttattttttagaaggtattagttattttttaatgatatgaatttaaattatttatattttaagttgataaaaagattagttaagtaaatattaaataaattaaggtaggagattgttttgaaggtgttgtttattcgttttttttagatttggagttttagggttttcgtgaaggaaatttttttagtatttggggattttagggaggatattttgatttttggatattttaaaattttggatttttttgattattttttttatttatttagtaaatgttataggtttaggttttgaaattttttatttttatttttttttaattttttgttttttgttggtaattttgttgttttaaatagtttttaaatagtgttgaagttttgtttaatgttttttaagagtaaggaggtcgtgatgagttttatagaggaggaaatttacgtgttagagaagttatttttaggtacgagttttagcgttgttggttgtgagtttgttgttgatgatattgattttttgatgatttatagttagaggtttttgggattttaattgtatgtatatatagatatatttttttttttatttgagagtaggtaatgtttattgaatagtttagaaaaataattatagtatatattatagtttatttttttaataagtttgttgatttggttttttttgttgttagtatttttattttttacgaaatgggtggtttgtttttttattttgttttatggagaagatattttgaaggattataggaagttatgtgtttttttgaagcgttttttaatagtatggattttatgaattatattttttatatagatgatgttatattttttaagagatcgtgtaaagcgttatttgttaaagtaattcgttttttattgattttgttataattacgtttgtagattagtttatttattgattttagatttaggtattcgtatgtaatgtatggttttataatttttagtatgttaattggtttttataaaggttttattgaagatttgataaaggtaaagaagttgtaatatatttcggatttttgggtttatattatcgatatttttgattttgatgataaacgttagtttggattttgtaggtttatagaagttgttagttttttttgatattttttttattcgaattttagttttgtatttttgtttatattttttgtgatagtgttttaattttttatagataagttttttttttgtttttcgaagtattttttgggtaaattttttttttaggcgtttggtttttagttttgtgaaattttttcgtttttttttaggggtttttggtatagcgggaattttttttttttttttttttatattttttatggttttagtcggaaaaagaggttggattttttttttaaaaaatatatatatttttaagatagagtttcgttttgttatttaggttggagtgtaatggtgtgatttcggtttattgtaatttttgtttttcgggtttgagcgatttttttgttttagttttttgagtagttgggattaaaggtgtttattattatatttagttattttttgaatttttagtagagatggggttttattatgttggttaggttggtttttaatttttttttttttttttttgagacggagttttattttgttatttaggttggagtttagtggcgtgatttcggtttattgtaagttttatttttcgggtttacgttatttttttgttttagttttttgagtagttgggattataggcgttcgttattatgttcggttaattttttgtatttttagtagagacgggggttttatcgtgttagttaggagggttttaaatttttgatattaagtgattcgtttgttttagttttttaaagtgttgggattataggcgtgagttattgcgtttggtttttttttggtgttttttgatttttatttgttttatttagtttttgtttttgtttttatacggttttttttttatgagttttttttttttttatttgagggtttattttaatttagtatgattttatttaagtttaattatatttgtaaaaaaaatttcgtaattttaaaatgaggttatattttgtagttttaggaggttatgaattttgggaggatatcgttaatttattatagttatcgagaatagtagtaggaggttggatgcggtggtttatatttgttatttcggtattttgggggatttacgtagtaggatcgtttgagtttagatgtttgagattagtttggtaatatagtaatattttattttttattttttttaaaaaaaaaattagtcgggtatggtagcgtgtgttggtagatttaattatgtaaaaggttgagatgggagggttattgaagtttaggagtttgaggttgttgtgagttgtgtggcgttattgtatttagtttgggtaatagagtaatattttgtttttaaaaatattaatttaggtcgggcgcggcggtttacgtttgtaattttagtattttgggaggttaaggcgggtagattacgaggttaggagatggagattattttcgttaatatggtgaaaatttatttttattaaaaatataaaaagttagtcgggcgtggtggcgggcgtttgtagttttagttatttgagaggttgaggtaggagaatggcgtgaattcgggaggcggagtttgtagtgagtcgagatggcgttattgtattttagtttgggcgatagagcgagattttgttttaaaaaaaaaaaaaataaataataaaataaaataaaaataaaaaataaaaatattaatttaatttaattttaaataaaaaagtaggtggtttttaagaatgtaggagataattgatcgggtgtagtgttttatgtttttaattttagtattttggaaggttaaggcgggtggattatttaaggttaggagtttaagtttagtttggttaatatggtgaaattttatttttattaaaaatataaaaaattagttaggtatggtggcgcgcgtatgttatttttagttattcgcgaggtttagataggagaatcgtttgaatttaggagatcgaggttgcggcgagtttgagatggcgttattgtattttagtttgggtgatagagggagattttcgttttaaaaataaaataaattaaaaaaatgtaggagaggggtatacgaatatttggggagtatttttaatttttggatgtttgttgtatttttagtgtatagtataatttaatttttaataaatgtgtagtggaggtttgttgaataaatgaatgggttttagaagaatgaggtggagaggggaataggaagattgaatgttttttgtttgaaggtcgggcggggaggggttgggggtaggtaattttgaggtttattcggggttattgtttgtattttggtaattgtttttatttattttaggatttttagattggtagcggttggagggaattttttttcgttaattgtttaagttttttttttcgatcggtcggatatttttagagaggggtaggttggttttttgataggttgaagtaagtagacgtttaggagtttcgggagggggttgtagtttttttttttttttttcggtagcgtttcgcgtttttatcgttttttttgcgttagcggaggtgatcgtcgcggcgatgtcggaggagggttcgggttgttcggtgcggcgtaggttttatgggtgcgttttgcgggttgttttggttttattggtcgcgggtttggtgatttgtttcgtggtgtgtatttagcgtttcgtataggtttagtagtagttgtcgttcgagttatttggggtgagttgagatggaaaagttgggaagaaaatatagagaggcgcgtgatcgaaaagatagaatgagatgggtataaagaggttagagaggaagatttggtagggtagagatagagattagaatagggaggcgaggcggggattaggttgttcggtgtaggggttacgagataggtagttttgttaggaggtatagggagatttcgggatgggaaaggtaggtatatatggaaatggaagatgattcggttttggtgttttttcggtaggttgatttagaggttgttgggggttttataaggttgggcgtgggggttttttggggttttttaggacgggatggttttagttattcgtttcgggtgggggaggggtttttttggggatcgcgtcgggcgtttttgtagcgtagagagttcgttgcgcgcggtgttttcgcgtttagtgatatttaggaaaacgattcgggaaacgaagaagtttttttgaaggtttcgattttacgtttttcgttggtttagatttgttttttttttaagaagttttaagagtaaaaaaaaataaaatgaaataaaattattagtgcgcgtcgtgggatgagaggtggaaaggaggatggatagagaaaagagagtttttggtataggggatatatagaatttttttgtttacgttcgtgttttgttttttggtttttttttttagt

SEQ ID NO: 150 - DNA, 6004 bp, Artificial Sequence
  chemically treated genomic DNA (Homo sapiens)
attggaagaaaagattagaaaatagggtacggacgtaagtagagaggttttatgtgttttttgtgttaggagtttttttttttttgtttatttttttttttattttttattttacggcgcgtattggtgattttattttattttatttttttttatttttaagattttttaaagaggaagtaggtttgaattagcggggaacgtgaagtcgagatttttaaaagaattttttcgtttttcgaatcgtttttttggatgttattgggcgcgagagtatcgcgcgtagcggattttttacgttgtaaaggcgttcggcgcggtttttaaagggattttttttttattcggagcgagtggttggggttatttcgttttaggaggttttaggaagtttttacgtttagttttgtgaagtttttagtagtttttgagttagtttgtcgggggaatattagagtcgagttattttttatttttatgtgtgtttattttttttatttcgggatttttttgtattttttggtagggttgtttgtttcgtagtttttatatcgggtagtttggttttcgtttcgtttttttgttttggtttttgtttttgttttattagatttttttttttggtttttttgtatttattttattttgttttttcggttacgcgtttttttatgttttttttttaatttttttattttaatttattttaagtgattcgagcggtagttgttgttgagtttgtgcgaagcgttggatgtatattacgaggtagattattaagttcgcgattaatgggattaaagtagttcgtaggacgtatttatagggtttgcgtcgtatcgagtagttcgaattttttttcggtatcgtcgcggcgattattttcgttagcgtaggaggggcgatgggggcgcggagcgttgtcgagaaggaaggaaggaaattgtagttttttttcggggtttttgggcgtttatttgttttaatttgttaggggattagtttgtttttttttggggatgttcggtcggtcgaggggagggatttgagtaattggcgaggggaaattttttttaatcgttgttagtttgaagattttaaagtgggtggaggtagttgttaggatgtaggtagtggtttcgggtgagttttagagttgtttgtttttaattttttttcgttcgatttttaggtaggagatatttaatttttttatttttttttttattttatttttttggggtttatttatttatttaataaatttttattgtatatttattagggattagattgtgttgtgtattggggatatagtagatatttaagaattgggggtgttttttaaatattcgtgtattttttttttgtatttttttgatttgttttgtttttgagacggaggtttttttttgttatttaggttggagtgtagtggcgttattttaggttcgtcgtaatttcgattttttgggtttaagcgatttttttgtttgagtttcgcgagtagttgggagtaatatgcgcgcgttattatgtttggttaattttttgtatttttagtagagatggggttttattatgttggttaggttggatttgaatttttgattttgggtgatttattcgttttggttttttaaagtgttgggattaaaggtatgagatattgtattcggttagttattttttgtatttttggagattatttgtttttttgtttaaagttaaattaagttaatatttttattttttatttttattttattttattatttattttttttttttttgagatagagtttcgttttgtcgtttaggttggagtgtagtggcgttatttcggtttattgtaagtttcgtttttcgggtttacgttatttttttgttttagttttttaagtagttgggattataggcgttcgttattacgttcggttaattttttgtatttttagtagagatgggtttttattatgttagcgaggatggtttttattttttgatttcgtgatttgttcgttttggttttttaaagtgttgggattataggcgtgagtcgtcgcgttcggtttaaattaatatttttagagatagagtgttgttttgttgtttaggttggatgtagtggcgttatatagtttatagtagttttaaatttttgggttttagtgatttttttattttagttttttgtatagttgggtttattagtatacgttattatgttcggttaattttttttttggggggggtagaggatagggtgttattatgttattaggttggttttaaatatttgggtttaagcgattttgttgcgtaggttttttaaagtgtcgggatgataggtgtgagttatcgtatttagttttttgttgttgttttcgatggttgtagtgggttaacggtgtttttttagaatttatggttttttggaattgtagaatatgattttattttgaaattacggggttttttttgtagatataattaggtttaaatgaggttatattggattagagtgggtttttaggtggagagaaaagaggtttatagagaaggagtcgtgtgaaaatagaaatagaaattgaatgaggtagatgaaagttaagaaatattaagaaggagttaggcgtagtggtttacgtttgtaattttagtattttgggaggttgaggtaggcggattatttgatattaggagtttgagatttttttggttaatacggtgaaattttcgtttttattaaaaatataaaaaattagtcgggtatggtggcgggcgtttgtagttttagttatttaggaggttgaggtaggagaatggcgtgaattcgggaggtggagtttgtagtgagtcgagattacgttattgaattttagtttgggtgatagagtgagatttcgttttaaaaaaaaaaaaaaaagagttggagattagtttggttaatatggtggaattttatttttattaaaaatttaaaaaatagttgggtgtggtggtgggtatttttaattttagttatttaggaagttgaggtaggagaatcgtttaaattcgggaggtagaggttgtagtgagtcgagattatattattgtattttagtttgggtgatagagcgagattttgttttaaaaatatatatattttttaaaaagaggatttagttttttttttcggttggaattatggagggtgtagaagagaagaagaaggaagttttcgttgtgttagaaatttttaagaaaaagcgaaggaattttatagagttgaagattaagcgtttgagaaagaagtttgtttaaaagatgtttcgaaaggtaaggaggaagtttatttatgaaaaattgaagtattattataaggaatataggtagaggtatagaattgaaattcgaatggaaaagatgttaagaaaagttggtaatttttatgaatttgtagaatttagattggcgtttgttattaggattagaggtatcgatggtgtgagtttaaaggttcgaaatgtgttgtagtttttttgtttttgttaaatttttaatggaatttttgtgaaggttaattaatatgttgaggattgtagagttatatattgtatgcgggtatttaaatttgaagttagtaaataaattaatttataagcgtggttatggtaaaattaataagaaacgaattgttttgatagataacgttttgtacgattttttggaaaatatggtattatttgtatggaggatgtgatttatgaggtttatattgttggaaaacgttttaaagaagtatataattttttgtggttttttaaagtattttttttatgaggtagaatgaagaaatagattatttatttcgtggaaggtggagatgttggtaatagggaggattagattaataggtttgttagaagaatgaattatggtgtgtattataattatttttttaagttgtttaataaatattatttgtttttaaatggaaagaaaaatatgtttgtatatatatatagttagggttttaagggtttttggttatgaattattaagaagttagtgttattagtagtaaatttatagttaatagcgttagaattcgtgtttggggatagtttttttaatacgtggatttttttttttgtgaggtttattacggtttttttgtttttgggggatattagatagggttttagtattatttgggggttgtttgaaatagtaaaattattaataaaaagtaaaaaattgaaaggagataaaaatgggagattttagagtttgagtttatagtatttgttgggtgggtgaagagggtggttaaagaggtttagaattttgaggtatttagaaattaaaatattttttttgagatttttaagtattaaagggattttttttacggaagttttaggattttaggtttgggggaagcgggtagatagtatttttaagataattttttattttaatttatttaatatttatttagttgatttttttattagtttaagatataaatagtttagatttatattattaagaaataattaatattttttaaaagatgggggaaagagagatggggtggggtggtttatatatgtaattttagtattttgggaggtcgaggtgttttaggaaaattttaaaatgagataggagtagttaatttataaaaataaatataattgtttggtcgggcgtagtggtttatatttgtaattttagtattttgggaggtcgaggcgggcggattataaggttaggagtttaagtttagtttggttaatatggtgaaatttcgtttttattaaaaatataaaaattagttgggcgtggtggcggatatttgtagttttagttatttcgggaggttgagttaggagaatcgtttgaattcgggaggcggaggttgtcgtgagttgagatttggttattgtattttagtttgagagatagagagagagtttgttttaaaaaaataaataaataaaaaaaatataattgtttatgaaattgaatttcgtttattataagaaaattggaaattgaaagtttcgtgaaatataatttttttttttttttttttttttttttttttttttaagatcgtgtttttttttgtcgtttagtttggagtgtagtggcgttatttcggtttattgtaattttcgttttttaggtttaagtaatttttttgttttatttttttgagtagttgggattataggtgtttattattacgtttggttaatttttgtatttttagtagagatggggttttattatgttggttaggttggttttgaatttttgatttttagtgatttgtttatttgggttttttaaagtgttgggattataggtgtgagttattgtgtttagttatattttattttgttatttgtgatttggtaaaagattagagtgtttgatgatttattgtttagtaagtgcgtgggtgagaaggagttttaaatttggaggttaggagttgaaatggatttaattttttggaaggatagtttgttgaaatttattaatgtattaaaatgtattttttttttggtttagaaattttattttaaggatattttttcgtaagtatatttgtacgcgttatagacgcggacgtacgtatataaatttaacgtggtgtggtttgaatgatatcggaatataattaattagaagatttatgcgtaattgagggtttagttttgtgttaagtatttgttaggttttattttttttgatttttttaagaattttatgaagtgaattatgttgttatttttattttttttgtgagtaggtttagagaggaaggttattagtttaatttatttagtaaggagtttgggagaggaagtgtttagatttgaatgtggatttatatcgtgtatttgaagaatttggatttttttatttgagttatttagtgatttgatttggtttttgattattttttagtttgtgtagttttgttggaggttatttgtat

SEQ ID NO: 151 - DNA, 7676 bp, Artificial Sequence
  chemically treated genomic DNA (Homo sapiens)
aataaaaaattaaataagaatttataaaatttagttaatgaaaattaaaataatagtaaaggagaatatttattacgaagaagtgagtatttttattttataaggaagaaatgaagttttaatgattaatttagggttattttgttaataattggtgtatttgggatttgatttaaagtcggtttgatttagaaattgtgttatttattatttttttttagtgtggttatatatggatgtgggagttttttagggtgttggtaaggtttatattaggggttttgatgttgatgtttttaggaaatgttgagaaggtttttgaagaaaatattttgaaagtttggagaagataggtagaaagtggtagttaaagaatttttagttttaaaggaagaatagattttgtttagaaataaaaaagtaaatttttggaggtgataatggaagttggagaaaaattagtatttggttgtgtgggtattgagtagttttttttattttaaaaaaataaagattaatttttgttttttgagattgtagagttttgagggttatttttagatttttgttttatagagattgttttagttttggaaaatttatttttgagtttgttagacgtattgaaatatattaattttaagtgtagttgattagttgatatatttttttttgtaggtatttgataaatatttattatttttattgttgtagatttttttttgtattttaaagtaaaatttattttttagtttttaaatatgtttttggttttgaaagagtttttaatttttgtttttaggtgtcgtgtttgtagtggttattggaaaaaatgagtttggttgtttttttttagtatgtgtaaagtttgatatttgatagtagtattatttttaatgagtatttgttggtggttagatttaattaggtttatagatttttgttataggtttttagaagtttaatttattttttttttaagattttagtattttttgggttttgttttaatttatatataagtgttatgttattttttgagggtttttagggaaggacgtgatatgtgttttattttatgagtttatttttggattttttaaagattttttagaaaatattattttgtatattttattaggtagttagagataattgagtaaattaatattattaagtatagaaattatttttttagtgttatgtttggtagtagtaaataaataaaatgtttattatgtgttagatttttatggttttggatattgttacgtttattttgttatttaatatttttaataattttttgaagtcgagataataatttttaatttgtaattgataaatttgagatagagatttaagtgagttgtttaaatttaggtagaataggagagaaattttaagtgtttttaatagtagtgttattgagatatttaagattttaatttttttattttttttattttggtaaaaatattttacgtgtttgaaataatttttttgtattcgatgtggtgttaaatgtatttgtgattattcgtatatttgtaaatagttgtggaaatttaatttgattttgtttttaaagaaattataattggatgtagaaaaaaatgggataataagttttttaaattgtaagtaataattttttgttttttatatttttagtgtagtttttttcgtttttataatttaaagaatacgattgttttttattagaataaattgtttttgttagtacgtttttttttgtgtattttttgaatttgtttttttatttttttgtttaaaaatagttttatgatgagtttatattttagttttgatatattttatgagtggaaaggaaattatagatattatattatttaatattattgtgttaataaaaatgtaaatttttagagggtaggtatttttgtgtgttgtgtgtattgttatgatttttgtgtttaaattgtgtttaatataataaaagaatatataaaaaaatttaattagttataagatatattagttttatttttttttagtatttttgtattggtttttaaaattgtatttatttttcgaataatttttagtaagttttttttttgtaaatggttttatataaggtaaataaagtttgattatgtagttggagttattgtttgagttttatatatattttagatttggttttagttatagattaatgagtatttattaagagttgatgtagattatgatttttaagagtataataattttaattgtttttttttggttagttttgtttagttattattagtataatgtttagtataaagttattatttagtagatatttgttaaattaataaataatgatagaatttaaaatcgtaataatttattttagtgtttagtattgattatatgtttaataaatatttattgaattttattgaatattgtgtttaaagagagaattatgttatgtattttaaattaagtaggtattatatttgaattattagttgtttgggattatttgtgtggtttttttttattgttagggtggtaaattgagattttattttattagtaaattttttaaatttgtttagtatttggtttttataagattagtttattaattttaacgatggtatatttaattttaaaattaatgtatattatgatattatatattgtttattattattttaataataagaatttttttttagagtagtatattagttatttattaattggtttttttttttttttttttttttttttttttttttgtttatttatttttttttttttttaattttgaatgttatataaatatataaaggtttaaaggtaaggattttgataatattgtaaggtgtattagggttttttagagggatagaattaatatgtatatagggaagaatatatatatatatatatatatttatataaagggaagtttgttaagtattaatttatataattataaggttttataatatgttgtttgtaagttgaggagtaaggagagatagtttaagttttaaaattgaagaatttggagttcgatgttcgagggtaggaagtatttagttcgggagaaagatgtaggttggtaggtagggtttagaaaagtttaagaatagtgattagataattagtttaagaggatagatatttgattttatgtttataatatatggtttatttttttggtttttgagttatttgaattgtattatgttaagatgacgtaggtttttagattatagttattttttttttttagttttcgtaagaattaaaatgatttgattttagttttaataaatataacgtaatattaatgtgttttatattaggttaaatgagtttaaaaatatatatacgtatattatatatttatatataaatatgtataaacgtattttaaatagatagttaattggtgaatattttaaaatagaaagattatatatttttagtgtttttttgttttatgattggtagattttttgtaatataaattttttagtgggaataatttttaaagtatataatatgaaattagttgtttttgaataaagtaattaaatagaattatagtagatgttatttatgggggtggaaatggtgttattaatatagatattattatttaagtaaaggagaaaaatgtttaaataagtatatggcgttattttgttaatataattatattatattagttgttagtaaatttaaattgttaaatattaatatattaattattatataaataaatataagatatgaaatatttaagaaattgaaaagtttaatgtatggttaaatttttttataatagggaatatttttattatagatataaagaaatttaatttaaattaaaaattttagttttttttattgataaaagtttttttttattattaataagataatttttttttttttaagtagagttttataaattttttagttgagttattataaagattttttggtgtgtttttttttatttgaaatattttttgtttgaaattaaatttagttttaaaatagtaattatattattttttatttattttttattagtaatagtaaattttagagattagtagaatagtatttatgtgtttggaaaaggaattttatggatgatttaagtataagatttggttatttattaaggagtagtatatatatatttgtaaatattaatgttagataaaaatgaaatttgataaaggtgaaattattgtattgtatagattaatttaagtagagttttaattttgttttttaatattatattttgtagggttgtataagtaataagtttattaatattagtgtaattgttttcgaaatataagtggattttggagaatgtaggtagtataaatgagttttttttaacgttaaggtttatagtaattgattttttagagaatatgaagttttatgtttgagataaatttttttatttgttgttatgattgataggtttatttggtttgttttatgggggaagggaataggattggggtttgatttagggtatagtttttaggtttggggtttttttgtatgattgtttataagtgttatttattgttatatttttttaaatttgtattttcggattttaatattagtaattaatgtttttttttgagttttaatatagttattttttaaatatagttttatttttttggtgaagttttttttgaggtattaaatttagtattgttaattagaagaataggtggtatgtgatattattaaataggtttttttttattatgtttttttaagatagttaattatttagggttttgtttaaggatgtggggttgttagtagatttggtgaatataagggtaggttagattttggtttttgagtagtcgtgtatttttagtttcgtttcgggtgtagggattgtatagaaaagtaaaattatatagttttgattgtgtagttttgtttttaggattagaggtttatcgatttatgtcggagatggttagaaaaattaattttttataggacgtcgttttagaagtaattttgggtttagttttattttttttaggtatttttgagaaattaggtgagtagtaattttttttattttaatagtagagttatttttttattgatttttggttttggattatttgtgtgtgttaaatgtttatgtataagtgtttgtatgattattttttgttagtgttgatttattatttaaatttgtttgttaaattttattttaaaatgtttgaatatttttttttaaaaagttgaaagttttattatattagttaaatgattttatgatttaaattgtttaagtttatttaatattttaaaagttgaggtttgaaatgttgagagaaatgtttattttttttttagattttttttgtttgttgagaatgtttaaggttatattatttaatgataaagttaagtatattaagaatagttttgataaaatgtatgtggtattagttatattttgatgattttttaagggaattaattgttgaggtattagttgtaggatagtgatagaatatttgtttgttgttagttaattttggagagtttaggagagtttattttaagagtatgatattttagacgtatatttttagttttagttagataaaggtttgtgaagagtaagtgttaaggtaataaaatttatttagataataggaatgtaagattaatttaagttggttaattgtaatatagttggagatttggaataaaatgatataattgttttttaaaatatttagaatttttttatgtattttaatttagtatatagtttaattatatattttgagataaatgttgatattaagaagggtaagaaataatgtttaaaggaaaggttttttatttttaaatatattttgattttttatttttttagaatttgattattaattgttaatgtttgtaaatatatagatatataattaggtattttatgtttaagaggatagttatttttagatatattaatttataaatagataaagttagatatagaaagttgtttattttaaagataatatgttataaaaaggagtttttgataaaaaaaatttatgaaagtttttggatattatttgatttttttaaatataaattttattgttttagagaatgttggttttatttttttaattaagtagaaggttatagtaaggaatagaattattattaagaagattattgttttatgaagttttagtaaataaagaatttaatgaaaaatagtaatgaagtgattgataatttagaaatgttttattttagaatagaatagttatgttgaataattaggtatttatgtattagaaaattttttatataatgtttttgaaattgataggtaaagtatttttttgtatttaataaaatgatttaattgtaaattttatattcgtttttttgatgttgaatattttattttatgaaagtataggtttttttattttatttatattttatattagttttttattatttaaagtttgtaaattgttttatattaagaatttaagttagtattttttttttagaattataataaattttggtttgtttattaaaatttaaatttttttgaatatttattttagtagtaataatatttattgtatagttatagtatgaagaaatgttaagaaatagaaagtatcgtatgtcgtttataaaaagtttgtatatttgataaggtttgttaaagtttttttagttaggaaagagattataaagtttagatttttatttttggtaattattttaagtaattagataatgtttgaattaatgttaattttataaatatagagtgaacgaaaaatattggggagaaggaaaatttttaaaataatttttatttattaagttgatgtagaggtttatttattttaatttttttttttttttttttttgagatagagttttattttgttatttaggttggagtgtggtggtattatttttgtttattgtaatttttattttttgggtttaagtaatttttatgttttagttttttaagtagttgggattatagatatgggttattacgtttggttaatttttgtatttgtagtagagataggggttttattatgttagttaaattggttttaaatttttgattttaagtaattttttcgtttcggttttttaaagtgttgggattattagtatgagttattacgttaggtttagaggtttattttatatttattatatgttttgtttttttaattatattttattaattttgtattgttgtggtttttttttttaattttgaatttggttttttattattggtaagattgtatattttttttttgattattagggtttattttttgttttgtttggttaatatttttttttatttttttttatatttgttattttgggttaggttttaagttaatttaatgatgaattatgtaaaattgtttaagttataaaagagaagatttgtttattattttaggtttatagatgatttatggagtaatttatttggagaaacgtgtgtttttgttatttgtaaagtagttttagagtgatttttagttgggatattttaatttattttttttttttttttaga

SEQ ID NO: 152 - DNA, 7676 bp, Artificial Sequence
  chemically treated genomic DNA (Homo sapiens)
tttgaaaaagaagagaaaataaattagggtgttttagttaagggttattttggagttgttttgtagatagtagagatatacgtttttttaaatggattgttttataggttatttgtgggtttagagtgatgggtaggtttttttttttgtggtttgaatagttttgtatagtttattattgagttgatttaaagtttaatttaaagtagtaagtgtaaggggaaatggaaaaaagtattagttaaatagaataaggaatgaattttagtggttaaagagggaatatatagttttattaatggtggaaaattaggtttagagttgaagaagaaaattatagtaatgtagggttagtgaagtgtaattagagagataagatatgtgataaatgtaaaataaatttttgggtttggcgtggtggtttatgttggtaattttagtattttaggaggtcgaggcgggaggattatttgaggttaggagtttgagattagtttggttaatatggtgaaatttttgtttttattataaatataaaaattagttaggcgtggtggtttatgtttgtagttttagttatttgggaggttgaggtatgagaattgtttaaatttaggaggtggaggttgtagtgagtaaagatggtgttattatattttagtttgggtgatagaatgagattttgttttaaaaaaaaaaaaaaaaaaaaattaaaataaataaatttttgtattagtttagtaagtgaaaattattttaaaaattttttttttttttaatatttttcgtttattttatatttataaagttgatattgatttagatattatttgattatttaaaatagttgttagaagtaaaaatttgaattttgtaattttttttttgattggagaagttttggtaagttttattaaatatgtaagttttttgtagacggtatacggtgttttttattttttaatatttttttatattgtaattgtgtagtaaatgttgttattgttgaagtaaatatttagaaaaatttaaattttagtgaataggttaaagtttattatagttttgaaagaaaaatgttggtttgagtttttaatatggaataatttgtaaattttgaataatggaaggttggtgtaaaatgtagatgaagtgaaaaggtttatgtttttataaagtaaaatatttaatattaaagaaacgaatataaaatttgtagttaagttattttgttaagtgtaagaaagtattttgtttattagttttagagatattatgtgaagaattttttgatgtataaatatttaattatttaatatgattattttgttttgaaatagaatatttttgaattgttaattattttattattattttttattaaattttttgtttattaaaattttatggagtaataatttttttagtgataattttgttttttattgtaattttttatttagttaaaaaaatgaaattagtattttttgagataataaaatttatatttggaaaaattagataatatttaaaagtttttataaattttttttgttagaaatttttttttgtagtatattatttttgggatgaataattttttgtgtttaattttgtttgtttataagttagtatatttaaaaatagttgtttttttagatatagaatatttaattatatatttatgtatttataggtattgataattagtaattaaattttaggaagatgagaaattaaagtgtatttagaagtaagaaattttttttttaaatattattttttattttttttagtgttaatatttattttaaaatatataattggattgtgtgttgagttaaaatgtatgaagagattttgaatattttagaaaataattatattattttattttaaatttttaattatgttgtaattaattagtttaaattgattttatatttttattgtttaggtaaattttattgttttagtatttgttttttataggtttttgtttaattggggttgaaggtatgcgtttaaaatgttatgtttttaaaataaatttttttaaattttttaaggttgattgatagtaggtaagtgttttgttattgttttgtaattgatattttagtagttgatttttttaaaaagttattagggtgtagttgatattatatgtattttattagagttatttttggtgtgtttaattttattattgagtaatataattttgaatatttttaataggtaaagagagtttagaaaagaagtaaatattttttttaatattttagattttaatttttagaatattaagtgaatttaaataatttgaattatggaattatttagttgatataataaagtttttaattttttaaggaaaaatgtttagatattttaaaatagaatttaataagtagatttaaataatgggttagtattggtaagaaatagttatataaatatttgtatataggtatttagtatatataaataatttagagttagagattaataagaaagtgattttattattaaaataagaaaagttgttgtttatttgattttttaagagtgtttaaaaagggtgggattaagtttaaggttgtttttgaaacgacgttttatggagagttggtttttttgattattttcgatatgaatcggtgagtttttaattttaaaaataaaattatatagttaagattgtgtagttttgtttttttatgtaatttttatattcgaggcgaggttgggaatgtacgattgtttaagagttagggtttggtttgtttttatatttattagatttgttgatagttttatatttttaggtagggttttgggtgattggttgttttaggaaagtatgatgggagaggatttatttggtagtgttatatattatttgtttttttgattgatagtgttaaatttagtattttaaaggagattttattaaggaaatagaattgtatttaaagaataattgtgttgaggtttagagaagagtattggttgttgatgttaaaattcgaaaatgtaggtttaaagaggtgtgatagtagatagtatttgtgggtagttatataaaagagttttaaatttgaggattgtgttttgagttaggttttagttttgttttttttttttataaaataaattaaatggatttgttaattatgatagtagatgaggaaatttattttaagtataaggttttatgttttttgaagaattagttgttataaattttaacgttgaagagagtttatttgtattatttatattttttagaatttatttgtatttcggggatagttatattgatgttaatgagtttattgtttatataattttgtaagatataatgttgaaaggtaaaattggaattttgtttaggttagtttgtatagtataatgattttatttttgttagattttatttttgtttggtattaatatttataaatatgtgtgtattgttttttagtaagtagttaggttttatgtttaaattatttataaggttttttttttagatatatgaatgttgttttgttaatttttggagtttgttgttattaatgggaagtggataggaggtgatatagttgttattttaggattgaatttaattttaagtaagagatattttaaataaaaaagagtatattaaaagatttttataatgatttagttgagagatttgtgaaattttatttagagggaggaaaattgttttgttgataatggaaagagatttttattaataaaagagattaaaatttttaatttaagttaaatttttttatgtttgtaataaaaatattttttgttatggaagaatttggttatgtattaaattttttaattttttgagtattttatattttgtatttatttatatagtgattaatatgttaatgtttaatagtttaaatttattgataattaatgtagtatagttatgttaataagatgacgttatgtatttatttaaatattttttttttttatttaagtggtggtatttgtattggtggtattatttttatttttatagatggtatttgttataattttatttgattgttttatttagaaataattggttttatattatatattttgaaaattatttttattgagagatttgtgttataaagaatttgttagttataaggtaaagaaatattagaaatgtatgatttttttgttttggagtgtttattaattggttatttatttaagatacgtttgtgtatatttgtgtgtgggtatgtagtgtgcgtgtgtgtatttttagatttatttgatttaatgtgaagtatattaatgttacgttatgtttgttggaattaaagttaaattattttaatttttacgggaattagagggaagaagtgattataatttggaagtttgcgttattttgatatgatgtaatttaggtaatttaagagttaagaagatggattatatgttataaatataaagttaagtgtttgtttttttaagttgattgtttagttattgtttttagatttttttagattttgtttgttagtttatatttttttttcgagttggatgttttttgttttcgaatatcggattttaagttttttagttttggggtttggattgtttttttttgttttttagtttgtagatagtatattgtgggattttgtgattgtgtgaattaatatttaataaatttttttttatataaatatatatatgtatgtatatatttttttttatatatatattagttttgtttttttagagaattttaatatattttgtaatattgttaagatttttgtttttaggtttttatatgtttatgtgatatttagaattaagaaaagaaaaaaatgaatgaataaaagaaaaaagaagaaagaaaaggaaagaagggattagttagtaaataattaatatgttgttttgaaaaagagtttttattattggaatagtaatggatagtatatgatattatggtatgtattagttttaaaattaaatatgttatcgttagaattagtaaattagttttgtggaaattaaatattaggtagatttggggagtttgttgatggagtaagattttaatttattattttaatagtggggaggagttatatagataattttaaatagttgataatttaaatgtaatgtttatttaatttggaatgtatggtatgattttttttttaagtataatatttaatgaaatttaataaatatttattaaatatatagttagtgttgagtattgggataaattattacgattttggattttgttattatttattgatttgataaatatttattgagtggtgattttgtgttgggtattgtgttagtgatggttaggtagagttgattaagaaaagatagttagaattattgtgtttttagagattatggtttatattaatttttagtgaatgtttattaatttgtgattgagattaagtttaggatatatgtaaaatttaggtagtaattttaattatatagttagattttgtttattttatataggattatttataaaggaaggatttattgggagttattcgagaaatgggtatagttttgaaggttaatgtaaggatattagaagagagtaaaattaatgtattttatgattgattaaatttttttgtgtgtttttttattgtattaaatatagtttaggtatagagattatagtaatgtatataatatataaaaatatttgttttttaagagtttatatttttgttaatatagtaatattaagtgatataatatttgtaattttttttttatttataaaatatattaaagttgaaatataggtttattatggagttatttttaaataaggaaatagaaaagtaaatttaagaagtgtatagggaaaagcgtgttgataaaaataatttattttaatggaagatagtcgtgttttttgagttatagaggcggaaaaagttatattgggaatgtgggaggtaagaaattgttgtttataatttaaaagatttattgttttatttttttttatatttagttataatttttttagaagtaagattaaattaggtttttataattatttataagtgtacgaatagttatagatgtatttaatattatatcgaatataaaaagattattttagatacgtaagatatttttattaaagtaagaaagataaaaaaattaaagttttgaatgttttagtagtattgttgttaggggtatttggaattttttttttattttatttgggtttaggtaatttatttgaatttttgttttagatttgttagttgtaaattggagattattatttcgattttaaagagttattaggaatattaaatgatagaatgaacgtgatagtgtttaggattatgagaatttgatatatggtaggtattttgtttgtttgttgttgttaggtatgatattaagaaaataatttttgtgtttggtagtattgatttgtttaattatttttgattatttgataaaatatataagatagtattttttaagaaatttttgagaagtttaaaagtgagtttatggaataaagtatatgttacgtttttttttgaaggtttttagaaggtgatatgatatttatatgtggattaaagtaaagtttaagaaatattggaattttaaaaaagaaataagttggatttttgaaggtttgtggtaggaatttataaatttgattagatttaattattagtaaatgtttattggaggtgatattgttgttaaatattaagttttatatatgttgaagggaggtaattaggtttattttttttagtaattattgtagatacggtatttggggatagggattaagggtttttttagggttaaaaatatgtttgggagttgaaaaataagttttgttttgaaatataaaaagaaatttgtaataatgaaaataatggatatttattaaatatttataaaagaagatatgttaattagttaattgtatttgagattggtatattttaatgcgtttgataagtttagggatggattttttaaaattgaaatagtttttgtgggataaaaatttaaaaatggtttttaaagttttatagttttaaaaaataaaggttaatttttgtttttttaaagtaaaggaaattatttagtgtttatatagttaagtgttgatttttttttagtttttattattatttttagaagtttatttttttatttttaaataaagtttattttttttttgaagttaaagattttttagttattattttttatttattttttttaggtttttagggtgttttttttaaaggtttttttaatattttttgaagatattagtattagaatttttagtgtaagttttgttaatattttgagggatttttatatttatgtgtaattatattagaggaaaatgatggatagtatagtttttaaattagatcgattttggattaaattttagatgtattagttattagtaaaatgattttggattaattattgaagttttattttttttttgtaaaatgggaatatttattttttcgtagtgaatatttttttttattgttgttttggtttttattaattagattttgtaagtttttatttgattttttatt

SEQ ID NO: 153 - DNA, 5396 bp, Artificial Sequence
  chemically treated genomic DNA (Homo sapiens)
  unsure (2325..)
atttgaaagagtttagtagttatgtaggtttttttgaattatttttttatgttaggtgggagagggagtttggagtttatatatttttagggtttatttatttttttttgattttagagtataagttaaattaaaaagttatttaaatttgtttttttttgattttgttaggatatatgtttgttgatttttatattttttttttaaattatttatttatagatgaggttgagattaatgaaaatataagttattggaaggaacggtttgatatttttattattatgttagagataataatagattagtgattagaagtaatttaggttggaagatttttgatatggttattataaattttttggtatttgaaaaaaaaaaaagtatgaaaattttggaatattatggtgataaggtatttatatttatttttattttttttttttttttttaagatgtaagagggtatatttatagttacggtaaaatatgattgaggatataaaatattgaaaattaagagttatttatttgaattttgatgggtttttttttgtatttttattttttaatattttaaaatgtataaaaattttagttaatgatatgttatttttgttttattatttaatataataaaagagaaattaaatattttagatttgatttttttgatttgagttaatgattttttttttttttttaaatatttaaaatgtttgttaattgaatagttagttatttttttatatttttaagcgaaatgttaatatttatatttaatatgatattattagaatgtgaagtttaaattttattttaaatttttaattatttattaaggaagtttatttttttaaataattttgtgaattttaatgttagattatttaagtttttggggatttaatagtatttgtgttttttatatgtaggagttttttttagaaatggtatatttaattgtttttttagttttaagagttatattgtcggttagggatagtggtttatatttgtaattttagtattttgggagatcgaggtgggtggattatttgaggttaggagtttaagattagtttggttaatatggtgaaattttgttttataaaaatataaaaattagttagacgtgatggtgggtgtttgtaattttagttattcgggaggttggggtgggagaatcgtttgaatttaggaggtggaagttgtagtgagttaagattacgttattgtattttagtttgggtgatagagcgagattttattttaaaaaaaaaaaaaaaaaaaaaaagttatatttttattttgttgttttttttttgtatttttttaaaatgtgatgggattgtaataagagtaattgtgttttggatatataatagataagttattaggaaatgttaaagataaagattaattatagtaatgttttaagagatttagagtataaaaggggttttaagtgagtttttaaatatagtatgttaataagtttaagtaaatattggtagaggttagtaaattaaagttagttgtaatatttaaagatatgttttagttatagtagttttttatgtgtagattttaattttatattttgttttagaaattttttttagataagcggtagaagaaaggtttttttttcgtagattacgaggttaggagattgagattattttggttaatacggtgaaatttcgtttttattaaaaaaaaatataaaaaattagtcgggcgtggtggcgcgtgtttgtaattttagttattcgggagattgagttaggagaatggcgtgaattcgggaggtagagtttgtagtgggtcgagatggcgttattgtattttagtttgggcgatagagcgagattttattttaaaaaataaaaattaattaaaaaaaaaaggttttttttttaaaaagaatagtatatatgttattaatttatttgtatttataaatttttggtttaaaaatttatttaaggttcggtatagtgtagtggtttatatttgtaattttagtatatcgggaggttgagataggtggattgttttgaggttaggagtttgagacgagtttgggtaatttggtaaaattgtttttataaaaaaatataaaaattagttaggtattggtggcgtatgtttgtaattttagttgttcgggaggttgaggtaggagaatcgtttgaatttgggaggaggaggttgtagtgagttgagatcgtgttattgtattttagtttgggtaataagagttaaattgttttaaaataaaaataagtaaattttgataaagtgtttttttttattagnngtagttaatattttgatataaattggtttaatgaggtttagtttttttgttagagatattaaaattattgtgggaaaatgttttgattggataaaatattttttagtgaggtgttatagtgaagatttttatagagagtaatgggaattagtatttaggggttaaggaagaagtatttggttgggtacggtggtttatgtttataattttagtattttgggagtttaaggtaggaggattattagagtttaggagttcgagattagtttgggtaatatagtgagattttgtttttataaaaaatttaaaaaattagttaagtatgatgatgtgtatttttggttttagttattgtggaggttgaggtgggaagattgtttgagtttaggaagtggaagttgtaatgagtcgagattatattattgtattttagtttgggtgatagagtaagattttgttttaaaaaaaaaaaaaaaaaaaaaaaggttaggcgtagtggtttacgtttgtaattttagtattttgggaggtcgaggtaggtagattatttgatttcgggagttcgagattagtttgattaatatggagaaattttatttttattaaaaaaatataaaattagtcggttgtggtggtttatgtttgtaattttagttatttggggggttgaggtaggagaaatgtttgaatttgggaggcggaggttgtagtgagtcgagattacgttattgtattttagtttgggtaataagagtgaaattttgttttaaaaaaaaaaaaaagggaaaaagtattattaaaaataaatgaagaacgtggtaggaaaagtttattatcgagtttgttaaaggttttggaagttataaatgttagagattattgtgatatttttaattgggttttttttaaattgggagaggattagtttaatagttgaatattgttttcgggttaatgaatttggaattatttgttttgttttagtttattgaaaattttttagataaaggataataaatgttttgattttaaaataaattttaaggggaaagttatttttagtaaaaatataattaaaaaatatatatattttgttgttttaggtttatttagaatagttttaatttatttagtagtagaaagttttttataagttagtttttttggaattttttttattataaataaatttaaaattatggttggtagattttatgaagttttaggtttattttaggtgatgataattgagagaagtagtagttttatttttatagagtatgatatatataaataaagtatatttatagtgttatttttttagtttaggaaaatttatatatagtattagatattaatttttttgtttataaattatggttaaggatgtttttttaattttttggaatagggaggagttataattataggtggttttgatacgcgtgtaattttcgttattattttttaattgttttttaaaagtttgtaatttttttttaatttttagttttgggggtttatattgacgtttagattttataaattttttttttagatatataatatgttaatttatgcgaatcgtttaagtttgttttataattatatttatggatatttttgtaagattttacgtttttattttaataataaattattaaaatttttggaaataatttagaatttgtatttgagtagataagagaaaggaagtgatggttttaaagggacgtagttttgtcgggtttaaaagaggagttttcgtttatttttgagcggtttaagatgttattagaagttttcgttagatgtgcggggcgggggtgcgggtataggtaaggtagagaagatgggtggacggttttgggaagaattagggtgtcgaagtttgtaggcgggatggagtggaaggaggtgaggtaaaattaggtaagtataggaaggagttagtgtagcgaagaaaatagggtaggcgagaagtagagttttagaggaattaacgaattcgggattcggagggttttcgagggtttagtttttttattagaaagtcgcgtttagttttaggtattatagagcgtttttagttggtcgtttttatattagggttgtttgtattcgatttagtagaggttcgtaaggttttagtatttttattagggttcgttgcgtcgttttaatttgttggtttcgtttttaggagtttgatatatttcggcggtttttgaaagtcgatttcgaagtcgggtttggggtcgtgggaattttttcggttttagttattttttcgcggtagttataatattcggggtcgtggttcgataagttataataatagtaattgcgtagatgcgcgattcggcgggggaggtggtttcgtattatagcgcgtttgcgcgtaggtttaagtaggcgtttatttagaggggagggaggacgtcgtatttcgtttttattgaggcgcggagtcggattcggaggcgtcgagtcgtattcggagtcgcgtacgcgtaatttgtatgaacgaaggttagtgtttaaagacgtgttatttattgttagaattcgatttttattggagcggaggaagttcgtgggtggagttggttgtttggcgtttgcgttttgcggcgagcgggttggcgtgcggcgtcgttgcgggcgggagcggttgtaacgtcggtgtttgaggagcgatgtcgagggaaattattattttatagttgggttagtgcggtaattagagtgagcgaaatttcggttttttagttagttaggttttttagggttaatgggatttcgttgtgggattttggattttatttgtttttgttagaatcgtagttttttgaaaggcgagatatttttgatttagtgtttatttgtttaatttcgaggggtttttttttgtttagtttttggcgtatagttttttttttagatacgggagagttttgcggtttgattttttatttttggacgtaggcgtttagtttttcggtttttgattggaatttgttcggatttagatatttttttttttttttgttcgttttttttttttagt

SEQ ID NO: 154 - DNA, 5396 bp, Artificial Sequence
  chemically treated genomic DNA (Homo sapiens)
  unsure (3071..)
attggggggaaggggcgggtaggggagaaagaagatatttaggttcgggtaggttttaattaggagtcgggggattgggcgtttgcgtttagggataagaagttaagtcgtaggattttttcgtgtttgaggaaaggattgtacgttagggattgggtaggggagggtttttcggggttgggtaagtggatattgggttagggatgtttcgttttttagagaattacgattttggtaaggatagatggagtttaggattttatagcgagattttattgattttaaggaatttggttagttgaggggtcggagtttcgtttattttgattgtcgtattggtttaattgtagggtgatgatttttttcggtatcgttttttaggtatcggcgttgtagtcgttttcgttcgtaacggcgtcgtacgttagttcgttcgtcgtaagacgtaggcgttaaataattagttttatttacgaatttttttcgttttaatgagaatcgagttttggtaatgaatggtacgtttttaagtattggttttcgtttatgtagattgcgcgtgcgcggtttcggatgcggttcggcgttttcggattcggtttcgcgttttagtgagggcggggtacggcgtttttttttttttttgggtgggcgtttgtttgggtttgcgcgtaagcgcgttgtggtgcgaagttatttttttcgtcgaatcgcgtatttgcgtagttgttgttattgtgatttgtcgggttacggtttcggatgttgtggttgtcgcggggagatggttgaggtcgaaggggtttttacgattttaggttcggtttcggggtcgatttttaggggtcgtcgagatgtgttaggtttttgggagcgggattagtaggttgaggcggcgtagcgggttttggtggaggtgttggggttttacgagtttttgttgagtcgggtgtaggtagttttggtgtgggagcggttagttaggagcgttttgtggtgtttggggttgaacgcggttttttggtgagagaattggattttcggaaatttttcgagtttcgaattcgttggtttttttagggttttatttttcgtttgttttgtttttttcgttgtattggtttttttttgtatttgtttaattttgttttatttttttttattttatttcgtttgtaggtttcggtattttagttttttttagggtcgtttatttattttttttgttttatttgtgttcgtattttcgtttcgtatatttggcgggagtttttggtaatattttgagtcgtttaagagtgagcgagggttttttttttgagttcgataaagttgcgtttttttaaagttattatttttttttttttgtttgtttaagtgtaagttttagattgtttttagaggttttagtagtttattgttggagtagaggcgtgaagttttgtaaaggtatttataggtgtgattataaaataagtttgagcgattcgtatgaattagtatgttatatatttaggaaggaagtttatgaagtttaagcgttagtgtgagtttttaaagttgaaaattgaaagaaaattataagtttttaaagaatagttaggaaatgatgacggagattatacgcgtgttaaagttatttgtgattgtaatttttttttgttttaaggaattagagaggtatttttagttatggtttataggtaaggaaattgatgtttaatattgtgtgtgagtttttttgagttggaaaagtagtattgtaaatatgttttatttgtgtgtgttatgttttgtgaaaatggaattgttgttttttttagttgttattatttgaagtggatttaggattttataggatttattaattataattttggatttatttgtaatggaggaggttttaagggaattgatttatagggggttttttgttgttgaatggattaagattattttggataagtttgaaataataaaatatgtgtgttttttaattgtgtttttgttaaaaatagttttttttttaaaatttgttttaaaattaaaatatttattattttttatttgaaagatttttagtgagttgaagtagaataaataattttaagtttattgattcgaaaatagtgtttagttattaagttaatttttttttagtttgaaagagatttagttaaaggtgttatagtagtttttggtatttgtggtttttagagtttttagtaaattcgatggtaaattttttttattacgttttttatttatttttggtagtgtttttttttttttttttttttttaagatagagttttatttttattgtttaggttggagtgtaatggcgtgatttcggtttattgtaattttcgttttttagatttaagtattttttttgttttagttttttaagtagttgggattataggtatgaattattataatcggttaattttgtatttttttagtagagatggggtttttttatgttggttaggttggtttcgaattttcgaggttaggtgatttgtttgtttcggttttttaaagtgttgggattataggcgtgagttattgcgtttggtttttttttttttttttttttttttgagataaggttttgttttattatttaggttggagtgtagtggtatgatttcggtttattgtaatttttattttttgggtttaagtaatttttttattttagtttttataatagttgggattagaggtgtatattattatgtttggttaattttttaaattttttgtggagatagggttttattatattgtttaggttggtttcgaatttttaggttttggtgatttttttgttttgggtttttagagtgttgggattataggtatgagttatcgtgtttagttaagtgttttttttttgatttttaggtattgatttttattgttttttgtagaaatttttattatagtattttattgaagagtgttttatttagttaaaatatttttttatagtggttttggtatttttagtaagaaggttgggttttattaaattaatttgtattaaagtattgattgtnnttgatggaaaaaaatattttattagggtttatttatttttgttttgagatagtttggtttttgttgtttaggttggagtgtaatggtacgattttagtttattataattttttttttttaggtttaagcgatttttttgttttagtttttcgagtagttgggattataggtatgcgttattaatgtttggttaatttttgtatttttttgtagagatagttttgttaggttgtttaggttcgttttaaatttttgattttaaagtaatttatttgttttagtttttcgatgtgttgggattataggtgtgagttattgtattgtatcgggttttaaatggatttttaaattaaagatttatgaatgtaaatgaattagtagtatgtatgttgttttttttgaggaggggattttttttttttaattaatttttgttttttgagatggagtttcgttttgtcgtttaggttggagtgtagtggcgttatttcggtttattgtaagttttgtttttcgggtttacgttatttttttgatttagtttttcgagtagttaggattgtaggtacgcgttattacgttcggttaattttttgtatttttttttagtagagacgggattttatcgtgttagttaggatggttttaattttttgatttcgtgatttgcgaggaggggattttttttttgtcgtttgtttgagagaggtttttgaagtagaatgtgaggttgaggtttgtatataaagagttgttgtgattgggatatatttttagatgttatagttagttttaatttgttggtttttattagtgtttatttaagtttattaatatgttatgtttagaggtttatttagaattttttttgtattttgggttttttaaagtattgttgtgattggtttttatttttggtattttttagtagtttgtttgttgtgtatttagaatatagttatttttgttatagttttattatattttaagaaggtgtaggagagagataataaaatgaggatgtgattttttttttttttttttttttttgagatggagtttcgttttgttatttaggttggggtgtaatggcgtgattttggtttattgtaatttttattttttaagtttaagcgatttttttattttagtttttcgagtagttgggattataggtatttattattacgtttggttaatttttgtatttttgtagggtagagttttattatgttggttaggttggttttgaatttttgattttaggtgatttatttatttcggttttttaaagtgttgggattataggtgtgagttattgtttttggtcgataatgtgatttttgagattaaaagaatagttgggtatgttatttttggagaggatttttatatgtgaaaggtatagatattgttaagtttttagaaatttggatagtttggtattggagtttatagaattgtttggggaaatgagtttttttggtaggtaattagagatttaaaatgaaatttgggttttatattttagtagtgttatattgagtatgagtgttgatatttcgtttagaaatgtggaagagtgattgattgtttagttaataaatattttaaatgtttaagaaagggaggaggattattagtttaagttagaaaaattaaatttgaaatatttagttttttttttattgtattgaataatgggataaaaatgatatattattaattgagatttttatgtattttgaggtattaggagataggagtataaaaaaaaatttattagaatttaggtaggtagtttttaatttttagtgttttgtatttttagttatattttgtcgtaattgtgaatatgtttttttatattttaaaaaaaaaaaaaaaagatggagatagatgtagatattttgttattatagtattttaaggtttttatattttttttttttttaggtattagagaatttatggtggttatattagaggttttttagtttagattatttttggttattgatttgttattgtttttagtataataatagaaatgttaggtcgttttttttaatagtttgtgtttttattagttttaattttatttgtgaatgagtgatttgggggaagaatgtgagagttaataagtatgtattttgataggattagaaaagaataggtttgggtaattttttggtttgatttgtattttgagattagaggagggtaaatgaattttggaaatgtgtgaattttaagtttttttttttatttaatatgaagagatagtttaaggaggtttatataattgttgagtttttttaggt

SEQ ID NO: 155 - DNA, 4415 bp, Artificial Sequence
  chemically treated genomic DNA (Homo sapiens)
aaaaggtgatttattgtattattgaaaagatttaattggaaagttttttttataattaatttaatatgattgtatttttttttaattattatattttaagttttagggtatatgtgtataatgtgtaggtttgttatataggtatatatgtgttatgttggtttgttatatttattaatttgttatttatattaggtattttttttaatgttattttttttttagttttttattttaattattattatatattatttatatagtattttattatatttattttaagagattttatatgattagtgttgattgatagttataaaatgatatgaattatttgaaataatattatttgagtatttgtaaatttgttttgagaggttatatatagttgtataaggttttataatttttaggtagaatatttggatttgaagataagattattagattttgagtttagattttttttaaattgttatatatttaattagtagggatttattgagtttttagtatttattggttattatgttaaaagtgttgaagtattaatggtgaataagatatagatatttttggtttttttagagttaataatttggtaattgtttatatatgagttgtatttttagtttttggtatagtatagagtaataagtaaatttttttttttgtgtattaattatttagttattatattgttttatgggtgttttttttttagataaaatatgttttttttttttaatataggagttattatttttttttggatatttttaatttcgttagtattttttttaaggagtggtattttgaattagatatttaggtttttagtatgatttggtgggtgtgtagtgtttagagattgtggttttagaagatttgaaggttgaattattaggagtgtaatttggatttattatagttattttgattttttatggtagtgtttatttttatggttcgtaaaattataagattttttttttgtgaattgtgattaagttagattttttttatattgtatttaaatattggaaatatttaaatgttgatttttaatgtatttttattaaattttatttcgttatttggaatattattatatattttgaggttttttttattttgttttttttatttttaaggttgttttttttagttttgtattattaataggttagataattacgtgttgtattagtttgtttttatacgttgataaagatatatttaaaattaggaagaaaaagaggtttaatggatttatagttttatttggttggggaagttttatagttatggtggaaggtaaggaggagtaagttacgttttatatggatggtggtaggtaaagagagagagtttttgtatggggaattgttttttttaaaatcgttagtttttgtgagatttatttacgattatgagaatagtacgggaaagatttgtttttatgatttagttattttttatagggttttttttataatatatgggaatttaaaatgatattttagtggggataaggttaaattatattatgtgttttatgttattaataaaaaggttaaatcgaataagtttaaagataaaatttagtagtattttatttagataggttagtttaaatttgttaattttatatttgtaattttgattatttattaattttgtaaattttaataaatgttttattttaagttaaatgttgagatgaaaaaatgaaattatatgagttagtaaagtagaaaatataggtatattaattagtaaatgtagaatgataaatgttttattaatatgtatttgttgtagtgaggttatcgaggagggtgtaatttttttaatttgggaggagtaggtaggattttagatgttatttaatttaaagatatagtgagggatttgattaaatatttgttaagattattatgagttaaatgaatagattaggtatttttttaatgttgtaagtttcgaattatatttaaatttagaataatatagtttggttataatgattttaaggattttattggttattgtttttgagttttaaaggaatatattaaaattttataatatttttttgatttattttgaagttaagtagtgaatttatatgatgatgatataaatattgtaaaggatttttgggttatttgtttataagttagtattttttgaattaatttttttgatttttagatatttggtaggtgaagttatatttatatatttttatattttagaatagtatttttaatttatttttttttttttgttttttagtgggagttatattagtatttaagaggagatttagaagtttttttaattaggtagggatagttatagattttagattttagttatggtttttgttatagagtataaatgttatatagtataagtttattgtatatattttattgagtttttgagttttagaatttttttgtagaatttaatagtttttttatgtcgtatttatatattattgttagtatttagaatttttttttttaaatgtataacgtttattattgtattttttgtatttattaagtggaaaattatgtattagatattgtagaagtagatataataatgaataagaattggttttgattatgagaggaattgatgatttaatgggggagatagatttgtacgtgtttaataaaaggaagtggttatttcggtttttttttgatgggtaagtattttgtaaggttttgggttatgtgtgtgtaaggttaagttagttagttaattgggatttttttaaaaaggtattttattggggggaaaaggaatatagagttggttattgtttttttgtttataataaaaatttattatttttaattttttaattgggtttgcggttaaattttatagtttaagagatttgttattttagatggattttatatatttgtatttaagtatgtaaaaaaattttaattatttagtaatttaattaaattattggtaatttttttaaaataaaaaaaaattgttttttttgttttggtagtaattttagttatagttttttattttttatttaagaaaatagttttaaaaagttgatgtttgttgttaaaagaattatttttatgaataaatataaaattaagaagttatggtgttttttttttaaaaaatgatttattaaaagaaataattttttttttttttttgtaagagaaaaaaattaattttttttagaattgtaaatatatttttttgatggagaaaattaatttatatggtatagtcgttatttatttagtttaaaaattagagtagaatttattattttgtttttattttttttttttttatttttttaatttatattggatttagaaagttttattttgtaattagtattgttttttatttttttagtaaagatagttttttggagtcgaagatgaggaaaagtttgtattttatagttttggaagtgtttttttttgttaggatagagagaggagttttagtagtgagagtaattgaaggggttaatagtggaatttggttgggtgtttgttaaatttttttttttggttttgttttgggtttttttttgaagggattttttttcgtttttgtaataagattttttataaagtatagattttttattttatttcgcggtatttgtatcgggttttattggttttaggagttgaatatttttttaggtatatataggtgggatataaataagggttttggaattattatttttttattacgatagtaatttaaaatgtttgggaagatggtcgtgatttttggagttttaaatatattttggataatgtttgtagtttgtaagttatttttttttatttgttttaaatgttagtatttaattttagttttggttttggttttagttagttttgcgatagtagtgaagtaaagatattaggattttaaatagtaggaaaagttaatttagtttaatttttaatatgtaattgagttttgttatatattattgtattgttatagttagagttgaaaattgatgtttttggtatttttttttttaaaggtaattgagtaatttggattttgtttttagtcggtttgtttttttagttttttatatttgataatgaggttaaatttagtaaataataaaatagttttgataaatgggtattaaggttggaattgagaattttttttattgaagatgattttataaatttttttggtagtgatttcggtgttttttggttattttgtagttagtttgaagtagtttaggaaagagattagtttgattatattttagatattatatagagaagaaggaggagaatattagataaattagtggtaaatttgtttttgtttttttttgtttttgtagt

SEQ ID NO: 156 - DNA, 4415 bp, Artificial Sequence
  chemically treated genomic DNA (Homo sapiens)
gttgtaaaagtaaaaaaagatagaagtaaatttattattagtttgtttagtattttttttttttttttttgtataatgtttaaaatatgattagattgattttttttttaagttgttttaaattaattgtaaggtagttaaaaagtatcgaagttattgttaaaaaagtttatggaattatttttagtagagagaatttttagttttaattttgatgtttatttattaaagttgttttgttatttgttaagtttgattttattgttaagtataggaaattaaagagatagatcgattagagatagaatttaaattatttaattgtttttggaaaaaaagatattaaaaatattaatttttagttttaattatgatagtataatggtatatagtaaaatttaattgtatattaaaagttagattaaattaattttttttattgtttaaaattttagtgtttttattttattattatcgtaaaattgattgaagttaaaattagggttaaaattgaatgttaatatttgaaatagatgaagggaaataatttataagttgtaaatattatttaaagtatatttgaggttttaaggattacgattatttttttaggtattttaagttgttgtcgtgatgagaaaatagtggttttaaaatttttatttgtgttttatttgtgtgtgtttgggagggtatttagtttttgaagttagtgaggttcgatgtagatatcgcggagtgaaatagaaagtttgtgttttataaagggttttgttgtagaggcggagggaaatttttttaaggggaaatttagggtagagttagggaaaaaagtttaatagatatttagttaagttttattattaatttttttagttgtttttattgttgaagtttttttttttgttttggtaaaagaagatatttttaagattataaaatataggtttttttttattttcgattttaaaaggttatttttattggaaagataaaggataatgttgattgtagaatgaagttttttgaatttaatgtgggttaagggggtggggagagaaaaaatggagatagagtagtaaattttattttggtttttgaattggataaataacgattatgttatgtgaattgattttttttattaaggaaatatgtttgtaattttaaaagagattaattttttttttttataagagaaaggaaaaagttattttttttgatgagttattttttaaaaaagggatattataattttttagttttatatttatttataaaaatagtttttttagtaataaatattaattttttgaaattatttttttgagtagaaagtaaaggattgtaattgaaattgttgttaaaataagggaaataatttttttttgttttagaaaagttattaataatttggttaaattgttggataattggaatttttttgtatatttaaatgtaagtgtatggaatttatttgaagtggtaaattttttgggttgtgagatttaatcgtaaatttagttaaaaaattaaaaataataggtttttattataggtaaggggataataattaattttatgttttttttttttttagtgaagtgtttttttaaaaaaattttaattaattaattggtttagttttgtatatatatagtttaaggttttgtaaaatgtttgtttattaaaaagaaatcggaatagttatttttttttattaaatacgtgtaggtttattttttttattggattattagttttttttatggttaggattagtttttgtttattgttgtatttatttttataatatttaatgtatgattttttatttagtggatataaaaaatgtaataataaacgttatatatttggagaagaaaattttaaatattagtaataatatgtaaatacggtatgaaaaaattgttaaattttataagaaaattttaaagtttagagatttaatgggatgtgtataataaatttgtattatataatatttgtattttgtaataaaggttatagttgaggtttggaatttataattgtttttatttggttggagaggtttttggatttttttttggatattgatgtggtttttattaaaagataaggagggaaaaataagttggagatgttgttttagggtgtggggatatataggtatgattttatttattaaatatttagggattagaaaaattgatttaggaaatattagtttataaataagtaatttagaggttttttatagtgtttgtgttattattatgtaaatttattatttaattttagaatagattaaaagggtattatggagttttaatatgtttttttgaggtttaaagataatggttaataggatttttgggattattatgattaagttatgttgttttgagtttggatatgattcgaagtttgtaatattggagaaatgtttaatttatttatttaatttatagtggttttggtaaatgtttgattaagttttttattatatttttgagttggatgatatttgaagttttatttgttttttttaggttgagaggattgtatttttttcggtggttttattataataagtgtatattgatggagtatttattattttgtatttattgattaatatgtttatattttttattttgttaatttatatggttttatttttttattttagtatttagtttaaaataaagtatttattaaaatttgtagaattaatgaatgattagagttgtaagtataaggttaatagatttagattaatttgtttgaataaagtattattgagttttgtttttgaatttgttcggtttaatttttttattagtagtataaagtatataatatggtttggttttgtttttattgaaatattattttgaatttttatgtgttgtgggagggattttgtgggaggtaattgaattatggaggtaaatttttttcgtgttgtttttatgatcgtgagtaagttttataagagttgacggttttaaaaagagtagttttttatatagaagttttttttttttgtttgttattatttatgtaagacgtgatttgtttttttttgttttttattatgattgtgaggtttttttagttaggtggaattataagtttattaaatttttttttttttttggttttgggtatgtttttattagcgtgtgaaaataaattaatatagtacgtgattatttaatttattaataatgtaaaattgggaaagataattttagagatgagagaagtaagataaagaagattttaaggtatgtaataatattttagatgacgaagtaaaatttaataggaatgtattaaaggttagtatttaaatgtttttaatgtttgagtatagtatgggagagatttgatttggttataatttatagaaagaaggttttgtgattttacgaattataaaaatgaatattgttatgagaaattaaaatagttgtgatgagtttaggttgtatttttagtaatttaatttttaagttttttgaggttatagtttttgagtattatatatttattagattatattgggagtttgggtgtttaatttagaatgttattttttaagaaagatgttgacgaaattaagggtgtttagagaaaagtaatagtttttatgttgaagaaaaaggatatattttgtttagagaagaggtatttatgaagtaatgtgataattgaatgattaatgtataggggaaggaatttatttattattttgtgttatattaaaagttaaaagtataatttatatgtaggtaattattagattattagttttagaggaattaagaatgtttatgttttgtttattattagtgttttagtatttttaatatagtaattagtagatattaggagtttagtaaatttttattgattgaatatataataatttaaaggagatttggatttagagtttaatagttttgtttttaagtttaggtattttatttaggaattgtgaaattttgtataattatatgtagttttttagagtagatttataaatgtttagatagtattattttaagtgatttatattattttatgattattaattaatattgattatatgaaattttttaaaataaatatagtaaaatgttatataaatggtatatggtaataattagagtagggggttgggggagggatagtattaggagaaatgtttaatgtaaatgataagttgatgggtgtagtaaattaatatggtatatgtatatttatgtaataaatttgtatattgtgtatatgtattttagaatttaaagtataataattaaaaaaagatataattatattaagttgattgtaaaaaggattttttagttaaatttttttaataatgtaatagattatttttt

SEQ ID NO: 157 - DNA, 6255 bp, Artificial Sequence
  chemically treated genomic DNA (Homo sapiens)
tattttagtttgggtgatagagttagattttgttttaaaaaaagaaaaaaagaaatgtaatttttttttttatatattttataatattttttaatattagtggtttttaaattaattatatggtaaagagtaatgtcgagttagttataattaagagtaaatgttatatagttttttatttttgtagtttataattttgtagtaatttttttttttttttttatttttgagttgtatgaatatttattttagtttgattaattattgatttggaatattcgtttattttttgttttgtttattttgaaatgtttgtttttttgtttgtttaattaaatattattttttttttgagggtagatttagttttattgttttatagatttttttttatttttaggttcgtggggatttttttttgtttggaatttgagtattatattttttttgttatatatttgtaatttagttttatgatgattttttagtttagttcgtgtaatgaattgatttttttttttttatggtaatattttagtttttaataatttgtgttatgtttagtgagattgaaaattttattatttttattttagatattagaaattagatttgtaattttttaagtgttaaatgagaattatgtggttaagtgtttatatatatttggggttttattattatggaggaaaagtagaacggatatattggaggatatttagtagtttgtattataggagagaaatgtaaaatgattatgttagaaaaggataattaaaaggattagtataagtagtttatgttatgggttttgttgtgggaattataaagaaagaattgaaagtggattttgaaggtaggtatattagtgatttattgttatgaataaattattataaatttagaggtttaaaataatatttatttatttttatttattttattattattattattatttttgagatggagtttcgttttattgtttaggttggagtgtagtggcgtaattttcgtttattgtaagtttcgttttttaggtttacgttattttttttttttagtcgttcgagtagttgggattataggtgttcgtaattatatttagttaattttttgtatttttagtagagacggggttttatcgtgttagttaggatggtttcgatttttcgatttcgtgatttattcgtttcggttttcgaaagtgttgggattataggcgtgagttattacgttcggttttattattattattttttgagacggagtttcgttttgttattaggttggagtatagtggtatgattttagtttattgtaatttttgtttttcgggtttaagtgatttttttgttttagttttttaagtagttgggattataggtacgtattattatgtttagttaatttttgtatttttagtagagacggagttttattatgttggttaggatggtttcgattttttgattttatgatttattcgttttagttttttaaagtgttgggattataggtgtgagttatcgcgtttggttataatatttatttattattttataattgtgtaggttagaagttttgtatggtgtgattgggttttttgtttagtgtcgtaaagttgaaataaaggtgtttattggattgaaaataaggtgttttttggagtttttagttggaggaaaaatttgtttttaagattattttttttgttggtagagtttagttttttgtaattgtgcgattaattttttcgtttttttgttagttgttaggggttatttttagtttttaggggttgtttatatattttgatttatggttttttacgtttttaatttagtaatagtttattaaatttttttgtgtttttgagtttatttgttgtaattggttagagaaaattttttgttttaaaagagtttatgtgattaggttaagtttatttggataatttttttgttttaagattaattgtgttatataatgtaatttgattatgaaagtaaaattttttatagttatagtttggggattatggagagtgtgtatattcggagtgagaaatttcgggggatattttagaattttgtttattataataggtaagagttagataagtattgatagttttttaggtgggaaagaaatgtggagaaaagtttaaaagtgaaattttattaggaatttttggagattgtgaatatgttagtttgtgattgttttaataatgataatggttttttttattgaaggttttttaggtgttttataaatttttttatattagttttgtgacggtgttattattttatttgtcggagttatatttttattaagttgtgaagttggggttttggtttgagttttggatggttttgaatttatgttgtttgtattgtttaatttgtttgtttgtgggtttaaggtggggaagttgaaggtagtaaggttggtttggattttagattgtggagggtattggtgttaatatatgttaataggtattaagaaagattttagagggagttagtgaatgtggaaattagggggacggaaatgggtatgattatggatgttggggagtatatgggttggatgtgtaatgtgatattttttttgggaggttaatatggttagttaggtattaaagatgattatatgattaagtttttgagtttttttgttaatttgtaggaaatatatagtttagaagaataagttaaattatatataaatatataattagtaaagtggggatagggtgaggatttaataaaattatatattttttgggaggttatatatattttgggaggttatttatattttgggaggttaaggtaggtggattttttgagtttaggagtttgagattagtttggataatatggcgaaattttgtttttattaaaaatataaaaattagtcgggcgtggtggtatgtatttgtggttttagttatttgggatgttgaggtgggagaattatttgagtttggggaggttaaggttgtagtgagtcgaaattatattattgtattttagtttggataatcggagtgagattttattttaaaaaataaaaatataaataaaaataaataaaataaaataatttttaaaataaaaaaattatatcgttttattatttaatttttttttttttggatagggagttttattttgttgtttaggttagagtgtaatggtacggtattagtttattgtaatttttattttttaggtttaagtaagttttttgttttagtttttcgattagttgggattataggtatttgttattatatttggttaatttttgtatttttagttgagacggggttttattaggttggttaggttggttttgaatttttgattttaggtgatttgtttgttttagttttttaaaatgttgggattataggcgtgagttatcgtgtttggttttattatttaaatatttatattattaatataaagtaatgggtagagaaaatagttgtggtggttgtggtaggattagataaaaatttttatttgatgtgagaattttttgtttggaggtattattgaaagtgtttattttagaatgggaaagtttgggtaaaagcgaatttgaagtaagtaagacgtttggaagatgtttttttttttttttttttttttttgagatagagttttgttttgtcgtttaggatggagtgtagtggcgcgattttcgtttattgtaagtttcgtttttcgggtttacgttattgttttgttttagttttatgagtaattgggattataggcgttcgttattacgtttggttattttttttgtatttttagtagatacggggttttatcgtgttagataggatggtttagattttttgatttcgtgattcgttcgttttagttttttaaagtgttgggattataggcgtgagttatcgcgttcggtttggaagatgttttatataaagcgtgagggaattggataatttggttttatttattaaaatataaaatgtatatatttttgcgttttttttttttttggtaggtatttgcgttagataaatatatagatgtatagtataggggtaagtataatttatgtagaattgttttttaatagtgaaaattaggatttaatttaagtttatgagtaggaaattggttttgtaaatagttttattttatgtaatggaatattatgtagttattaagaagaatgaggtagatttttattagtagtgaaagataagggtattttaattaagggtaattatatttagttttaggaaaatgtttattaattttatttagttagaaaatatatatgtagaagtgaatttatagataagtttagaaggttatatatttagttgttaaatagaatgtttttgaggagggtagggggcggagtttgcgtttacgtgaatgggacgttgttgttttttagtgtatttttgttgtttgaattttttattaaaaatttttttatgtattgttgggagggaatggaaggagtattttgagggtttcgtgtgaagggaaaagttgaggaggggacgtgggagattttttggttttattaaattttagcgtcgtttgaggtgaggagatttcgtttcgttgaggtgattttgtagaggggcggagttttttagattcgaggcgggaggcggttcgggggcgggattagtcggttttagcggttcgtttcgtttttattatgtttttataaggagcgttcggcgttagggttcgggaattcggtagtaatttcggcggtttagttttaattttaggttttttttttaggaatgggggaggggcggggtttggcggcgcggtggttggggcggagtatttcgaaaagggattagtaggagtggcggtttaggtttgagttgcgttgttattgggcgcggcgacgagagggggcggggagttcgtgaggttggttacgtcgagggaagtttcgatttcgtagtcgttgtatagtttgttttttcgtcggttttcggtttcgtggattttatttttttgtcgttcgcggttcgtcgtttcgttcgtcgtcgcgatgttagtgttttatacgcgtacgatcgagagtattttggagtcggtggtatagtagattttttatttggtgataatgtacgaggagggcgaggtggacggtaaagttatttttgattttatcgcgttcgtggtcgtcgtgtaggcggtcgttagtaatttcgttcgggtgagcgcgtagggtttggcgcgggagcgggcgcgggaggtattttcggggttttaggttcgcgtcgcggttgtttgtggtcggttcgttggtcgtggtttttcgcgtgggtttcggagttaggcgtcgagggttcgaatggtttttttttcgttttgtgattttgagcgagttttgagttttttcgggttttagtgtttttatttataaaatgggagtagttatgaaaaaggttgttttgcgggtttgtcgtgaagatatggcgaggtattattcgtggagtgtttcgcgcggcgtgtggtttatagtagatatttaataaatgagagttgttgggatgttcgagggtttttgtttcgcgtaggtttcgtttttacgttgattttttcgtttttagcgttttttaggttttttcgatttggttgtgcgggggagggagagcgggtttttttacggattttttgtttttttttttagggatttttatttgagttacgttgtttttttttttaatatttttgttttttattttgagattcgtttcgtttattttcgttttttagagttttttgtatttcgtttttttatttatttgttttattttttgtcgttttttttttttttttgggtattttatttatgtttatttttttggtatttttatatttttatgtagttattcgtgattataagttcggttttttttttcgtttagttttgttgtttttttttttatttttttttgtggatatttttatttggcgttatttgttgttaaacggtttttttttattggggtttttttagattcgggggttttttttggtttttttttttggtaggaagtaagatggagttgttgggagaggtttgtggaatttgggatttgtcgtttttgtcggagagaaggttggggtattcgttttttatttataatttttttggtggttttgtagatttttgtaatttatagttgtgatttataatcgaggtgatttttgg

SEQ ID NO: 158 - DNA, 6255 bp, Artificial Sequence
  chemically treated genomic DNA (Homo sapiens)
ttaggaattatttcggttatgagttatagttgtgggttataggggtttgtagagttattaggaaagttgtggatggggagcggatgttttagtttttttttcggtaggggcggtagattttagattttataggttttttttaatagttttattttgttttttgttaggaggaggggttaaggagggttttcgagtttagaaaggttttagtgggaggaggtcgtttgatagtaggtaacgttaggtgaaaatgtttataggagggaatgaaaggaagggtagtagggttgagcggaaggaaaaatcgggtttgtggttacgaatgattgtataaaggtgtgagagtgttagaggagtgagtataagtaaaatgtttaggagggaggaggaggcgatagagagtgaggtaagtgaataaaagggcggaatatagggagttttggggagcgggggtgggcgaggcgggttttagggtgaggggtagaagtattagaaaggaggataacgtggtttaaataaggatttttagaagagaaggtaagggattcgtgggaaggttcgttttttttttttcgtatagttagatcgaggaggtttaaaaggcgttgagagcgaggaagttaacgtgggggcgaagtttgcgcggggtagggattttcggatattttagtaatttttatttattgggtgtttgttgtgggttatacgtcgcgcgaggtattttacgaataatatttcgttatatttttacgataagttcgtaaggtagttttttttatgattgtttttattttatagatgaggatattgaggttcggagaggtttaggattcgtttaaggttatagggcggagaagaggttattcgaattttcggcgtttggtttcggaatttacgcggaaagttacggttagcgagtcggttataggtagtcgcgacgcgggtttggggtttcggggatatttttcgcgttcgttttcgcgttaggttttgcgcgtttattcggacgaggttgttgacggtcgtttgtacggcggttacgggcgcggtgaggttaggaatggttttgtcgtttatttcgtttttttcgtgtattattattaggtgggagatttgttgtgttatcggttttaggatgttttcgatcgtgcgcgtatgaaatattggtatcgcggcggcgagcggggcggcgaatcgcgggcgatagagaagtaggatttacggggtcgggaatcggcgaagagatagattgtgtagcgattacggagtcggggtttttttcggcgtaattagttttacgggtttttcgttttttttcgtcgtcgcgtttaatggtagcgtagtttagatttgggtcgttatttttattggttttttttcgagatgtttcgttttagttatcgcgtcgttaaatttcgttttttttttatttttaagggaggggtttgggattggggttgagtcgtcgggattgttatcggattttcgagttttaacgtcgggcgttttttataagggtatggtgggagcggagcgggtcgttggagtcggttggtttcgttttcgggtcgtttttcgtttcggatttggggggtttcgtttttttgtagaattattttagcggggcggggtttttttattttaagcggcgttagagtttgatgagattaaggggttttttacgttttttttttaatttttttttttatacgaaatttttaaaatattttttttatttttttttagtaatgtatgggaaggtttttagtaaaagatttaaatagtagaggtgtattgagaaatagtagcgttttatttacgtaaacgtagatttcgttttttgttttttttaaagatattttgtttaatagttgggtgtgtagttttttagatttgtttatagatttatttttatatatatattttttaattaaatgagattaataaatatttttttggaattaggtatgattgtttttgattaaaatgtttttattttttattgttggtagaggtttattttattttttttaatgattgtatgatattttattgtatgaaataaaattatttatagaattaattttttatttatggatttgggttgggttttggtttttattattaaaaaataattttgtatgaattgtatttatttttgtgttgtgtatttgtgtatttatttagcgtaaatgtttattaggaaagagaaaaacgtaaaagtatatgtattttatattttgataggtaagattaaattatttagtttttttacgttttgtataagatattttttaggtcgggcgcgatggtttacgtttgtaattttagtattttgggaggttgaggcgggcggattacgaggttaggagatttaggttattttgtttaatacggtgaaatttcgtatttattaaaaatataaaaaaaatagttaggcgtggtggcgggcgtttgtagttttagttatttatgaggttgaggtaggataatggcgtgaattcgggaggcggagtttgtagtgagcggagatcgcgttattatattttattttgggcgatagagtaagattttgttttaaaaaaaaaaaaaaaaaaaaaaagatattttttaaacgttttatttattttaaattcgtttttgtttaagtttttttattttgaggtaaatatttttagtaatgtttttaagtaaaagatttttatattaaatgaaaatttttgtttagttttattataattattatagttgttttttttgtttattattttgtgttaatagtataaatatttgggtgatggggttaggtacggtggtttacgtttgtaattttagtattttgggaggttgaggtaggtagattatttgaggttaggggtttaagattagtttggttaatttggtgaaatttcgttttaattaaaaatataaaaattagttaggtgtggtggtaggtgtttgtaattttagttaatcgggaggttgagataggagatttgtttgaatttgggaggtggaggttgtagtgagttgatatcgtgttattgtattttagtttgagtaatagagtgagattttttgtttaaaaaaaaaaaagttgagtgatggaacgatatgatttttttattttaaaaattattttattttatttatttttatttatgtttttattttttgagatagggttttatttcgattgtttaggttggagtgtagtggtgtgatttcggtttattgtagttttgatttttttaggtttaggtgatttttttattttagtattttaagtagttgggattataggtgtatgttattacgttcggttaatttttgtatttttgatagagataaggtttcgttatgttgtttaggttgattttaaatttttggatttaagaaatttatttgttttggttttttaaagtataaatggttttttaaagtatatatagttttttaaaaagtgtatgattttgttaaatttttattttgtttttattttgttgattgtatatttatgtgtagtttaatttgtttttttgaattatatattttttatagattggtaggaagatttagaggtttgattatgtaattatttttaatgtttgattggttatattaattttttaaaaagaatattatattgtatatttagtttatgtgttttttaatatttataattatatttattttcgtttttttgatttttatatttattggttttttttaaaattttttttggtgtttgttagtatgtgttaatattaatgttttttataatttggggtttagattaattttattgtttttagtttttttattttagatttatagataggtaggttaaatagtgtaaatagtataaatttagagttatttagagtttaagttagaattttagttttataatttgatggagatataatttcggtaagtgggataatagtatcgttatagagttgatgtaagggaatttgtaaagtatttaggagatttttagtaaaagaaattattattattattagagtagttataaattgatatatttatagtttttagaaatttttggtagagttttatttttgagtttttttttatattttttttttatttagaaagttattagtgtttgtttaatttttatttattgtggtagatagaattttaagatgtttttcgggattttttatttcgaatatatatattttttataatttttaggttgtgattataagggattttatttttataattagattatattatatagtatagttggttttaaaatagggagattatttaagtgggtttgatttaattatatgagtttttttaaagtagagagttttttttggttagttataataaatgaatttaaaagtataagaggatttgatgagttgttgttagattaaagacgtgggaggttatgggttaaggtatgtgggtagtttttaggagttgagagtggtttttgatagttagtaaggaaacggggaagttggtcgtatagttataaggagttgaattttattaataagaagaatgattttggaaatagattttttttttagttgagagttttaggggatattttgtttttagtttagtagatatttttattttagttttgcgatattgagtagagaatttagttatattatgtaggatttttgatttatatagttgtgagataataaatgagtgttgtggttaggcgcggtggtttatatttgtaattttagtattttgggaggttaaggcgggtggattatgaggttaaaagatcgagattattttggttaatatggtgaaatttcgtttttattaaaaatataaaaattagttgggtatggtggtgcgtgtttgtagttttagttatttgggaggttgaggtaggagaattatttgaattcgggaggtagaggttgtagtgagttgagattatgttattgtattttagtttggtgatagagcgagatttcgttttaaaaaatagtaataataaggtcgggcgtggtggtttacgtttgtaattttagtattttcggaggtcgaggcgggtggattacgaggtcgagagatcgagattattttggttaatacggtgaaatttcgtttttattaaaaatataaaaaattagttggatgtggttgcgggtatttgtagttttagttattcgggcggttgaggaaggagaatggcgtgaatttgggaggcggagtttgtagtgagcggagattgcgttattgtattttagtttgggtagtagagcgagattttattttaaaaataataataataataataaaataaataaaaataaatgagtgttgttttaagtttttaggtttgtggtgatttgtttataataatagattattgatatatttatttttaaggtttatttttagttttttttttatgatttttatagtaaggtttatggtatgagttgtttgtattaatttttttaattgtttttttttgatatgattattttatattttttttttatgatataggttgttagatgttttttaatatattcgttttgttttttttttatagtaatagaattttagatgtatgtgggtatttagttatatggtttttatttgatatttgaaaaattataaatttggtttttaatgtttaaagtggggataataaagtttttagttttattaaatatagtatagattattaaggattgaaatgttattatggaaagagagaggttagtttattgtacgggttagattaaggaattattatgaaattaagttgtaaatatgtggtaaagaaggtgtgatgtttaaattttaagtaggaggagatttttacgggtttaagggtaagaaagagtttatgggatagtggaattaaatttgtttttaaaggaagaataatgtttggttaggtaggtaagagggtagatattttagaatgaataaggtaggaggtgggcgaatgttttagattagtgattagttagattgaagtgaatgtttatgtaatttaaagataaggaagaaaagggaaattgttataggattataagttatagaggtaaaggattgtatgatatttatttttgattgtggttagttcgatattattttttattatgtaattagtttggagattattaatgttagggaatgttgtaagatatgtaaaaaaaaaaattgtatttttttttttttttttttgagataaggtttagttttgttatttaggttggagta

SEQ ID NO: 159 - DNA, 7819 bp, Artificial Sequence
  chemically treated genomic DNA (Homo sapiens)
taattgaatggttttgggtttatttattgaattatgtaattattattataattagttttagaatattttattattttaaaataattttatatttattagtagttattttttatttttttttattttttttattttattttagttttacgtaatcgttatatttatttttgtttttatagatttgttttttttgaatattttacgtgaatggaattatataatatgtgatattttgtgattggttttttttatttaatgtttttaaagtttatttatatttaggcgtcgtggtttacgtttgtaattttagtattttgggaggttaaggcgggtggattatttgaggttaggagtttaggattagtttggttaatatggtaaaatttcgtttttattaataatatgaataattagttgggcgtggtggcggatgtttgtaattttagttatttagaaggttgaggtaggagaatcgtttgaatttgggaggtagaggttgtagtgagtcgagatggtattattgtattttagtttgggtaataagtgaaattcggtttcgaaaaaaagtttatttatgttgtagtatttattagtattttatttttttttattattaaataatattttattgtttaggttttttatattttttttatttatttatttttttatggatatgtgggttgtttttgttttttggtttttatgaataatgttgttgtaaatatttgtgtttaagtttttgggtgaatatgtttttattttttttggttatatatgtaagagtggagatgtaggagtgtatggtaattttatgtttaatttttggaggaattgttttgagatttttttttagagtggttggataattttatatttatattagtaatatataaatgatttagtttttatatatttttttagtatttgatattattttttattttagttgtttttatagatgttagtagtgatattttattatggttttaatttgtttaaaggttagtgatgttgaatatttttttagataattattttttatttatatatttttttgggtgaaatttttttttatattttttgttagttttttaattggatgatttgatttttttatgtagtgtttttatgttgaatttgagagttttttatatatttgttttagataggagttttttgttagatatgtggtttgtaaatatttttttttagtttgtaatttgtttttttatttttttaattaggttttttatagagtaaaaaaaaattaattttgatgaagttggattgatttttttagggattatgtttttggtgttatgtttaagaatattttattaagttttaagttttatagatttttttttatgttattttttagaggttttttgtttttattttattttattttttaattaagatagagtttcgttttgttgtttaggttggagtgtagtggtaggattttagtttattgtaattttcgttttttaggtttaagtgatttttttgttttggttttttgagtagttgggattataggtacgtattatttaattggttaattttttgtatttttatgtggttgttttcgagaattttttttgttttttgtttttagaagtttgattatgatgtgttttggtatgaatttttttgggtttattttgtttgtgatgcgtttagttttttgaatttgtagatatatgttgtgcgtgtgtgttgttaaatgaagataatttgtagttattattttttggaatatttttttaaggtttatttttttttttttttttttttgggattttaatgataaaatgttagatttttttttattatagttatttatgtttttgaggttttgttttatttttttttatttattttttttttattgtttagaatgggtaatttttattgttatacgttttgttttattgttttttttttttatattttttattttgttattgagtttatttattatggtttttattttagtttttgtattttttagttgtattttttagttttaaagtttttatttggtttttttttatattttttatttttttgttgatattttttattattttatttgttttaagtatatttataattttttagtgaaatatttttatgatggttgttttaaaatttttgttagataattttaatatttgtgtcgttttgatgtttgtgtttgttaattattttttgttatttagtttgagaatgtttgatttttagtatgataagtgatttgttattgaagttaggatattttgggtattgtgttataagattttggattttttttaaatattttgttttagtgggtttttttttatattgttttagcgaaataaagtagggtattgtttgattgtttttagatagggataaaagtttaggttttttatttagttttttttgaatttggggggttgggagagatgaggtttttatgttattgtttggtaagggtagaagtttaggttttttattaggaatttatgataattttttggttgggagtgggagggatgttttattattgttttttatgtggtttttattgatattgtgtgtggtagagagaggggggtgtttgttattattgagtggtggcgaaagttttaattttttattaggttttttttgatattattttaatggggtcgggtggaatgttttatttttgtattggggtggtagtggatgtttaggttgtttatatggtttttattaatattatatcgggggagggtgattttagtggggaggaatgttttagttttaattttagtattattttggttgagtatgggagtggtttagggttttttgttatagtttggtgaaggtgaatgtttaggttttttattcggtttttgttgataagggtgatgatggaatttggatggagcggagtaggtatggattaaaagagttttgtttttttaggatgttttttttttcgttttttggttagaaaagtatagttttgttagaatttgttttgttgggatttttttttgtttgtgttttttggtatttttagttgttggtttttttagtatttagtttgagatatatgaggtaaagagaaattttagggaatttattattattttttaagtttcgaggtttttaattagtttgtttttttttattttttagtttttttatgtttgttttgttacgtttaaggtttttagttatatttggtagaataaataaatatatttattttatttttttagaatattattgttttttgtttattttatttatttattatttattgagataaggttttattttgttgtttgggttggagtgtagtggtgttattatggttgattgaagttttgaatttttaggtttaagcgatttttttgttttagttttttaagtagtttggattataggtatgggttattatgtttagttattttttattttttgtttttgttgattagttttatagagttttgttgtgttgtttaggttggttttaaatttttggttttaagtaatttttttgttttgtttttttaaagcgtattataggtataagttattatatttagttttatcggtgtttttggaagaaggtgtttttttttttttttgtttttttttttatggttagttgtttatagagggtagtggtgttggagtgaagattttttagcgtatttttttttatttgtaggatgtgtatggtttttaatgttgtttgttttgtttttgagatattcgttggttataggattataaaggtgatgaggttttagtttaaagattttttatttaataatattttttataagatattttttttgtttttttgagataggatttggttttgttatttaggttggagtgttatagcgcgatttgtttattgtaattttagtttttcgggtttaagtgatttttttgttttagttttttgagtagttgggattataggcgttcgttattatatttagttaatttttggattttttttttttttttttttagtagagatggggttttattatgttgtttaagttggttttgaatttttgagtttaggtaatttattcgttttggttatttaaagcgttaggattataggtatgagttattatgtttagttttataagatattttttttttttttttttttttttttttttttttttttttttttttgagatagagttttattttgttatttaggttggattgtagtggtgtgatttttttttattgtagttttcgttttttgggtttaagtgatttttttgttttagttttttgagtagttgggattataggcgtttgttaaaatatttagttaattttttgtatttttagtagagacggaattttattatgttcgttaggttggtttcgaatttttgattttaagtgatttattcgttttagttttttaaagtgttgggattttaggtatgagttatcgtattcggtcgagatattttttttttttttaatatttatgtgttttttttttaatttttgggggttttagtgtaggtggttagattttttattatttatgtttatgatgaaaagagtggaaatggtaataattggatggtgttattaaattataaatatttttaggtaggtttgtgttttttttagcgggttgtagtttttttgtttggtttgagttattcgtattttttgagagttgggtagagggggagttgtggaggagtttattttgaaattgatttgatattgtaaatttatatacggaaaggaagaattgtttatacgtattcgagttttttaatttgatttcgagttcgtattttttttaatcgttttttttttttattttttagattacggtgttgtttggttttttttagagttatagagaagtagggggtgtggttatggaggggaaatttttgttattagagattttattgtatttttttttttgtttttagatgttgttagggtttttgaagagggaagatacgcggaaataggtaaaaattattttgtttttattttgtatttaataagtaagttattacggaatagtagttatgggttaggtatattttttagagttgggaatatagtggggatttttttggtttttttttatcggtgttataataggttgtagatagatttttgttttgagtattttttttgttaggtttgttgagttttttgagagtagggtaggttattggatgtttaggagggaagaaggagttagggaggttagttttaaggttttgtaaggtttttaataggtttggattgaggaggtttggatagtatggttttgttttgagtttttgtgtataataattgttgtttttaatttttattttatttttagttttttaattttcgggtttggggttttatttttgtgttttagagatttttggagttttttgaggtagtatatagttttgttttggaggcgtttattttttatttatgttgggatgttttagttcgttttagagtaggttgtggttggagggtgttggtagaggagggataatggttcggtttttggaggtaagtgttggttgtagggaacggagtttagtttttgttatagtttttgttattttttaggtaattttaaggggattttaaagaattttggttttgtaattttgttaagttttttatggaatatgtaaaatagattttatggttaaagaagtatggataatgtattatattatattttaatttttatgtttagagattaatggtgtagatagagtttattgaaaggtttttaaagttttgtagtaaagaattttatttaagttaggtgcggtggtttacgtttgttattttagtattttgggaggttaagttggggggattatttgaggttaggagtttgaaattagtttggttaatatggtgaaattttatttttattaaaataaataaataaataaataaattagacgggtgtggtggtatatgtttatagttttagttatttaggaggttgaggtaggagaattatttgaattttggaggtagaggatgtagtgaattgagattatattattgtattttagtttgggcgatagaagaatgagattttgttttaaaagaaaaaaaaagaattttatttaatttttttattttgttttttttaagtgtatgtgattttgaagatgttttttgtatgtgatatgatgagtatttgcggggttgatgttagttttgtttggggaatttgttttagttttagattttgtattttaaatttatgtttagtttaggttagattttttttttgttgtcggtaagtagtttagtttttcgtatatttatgaatagatatttagtagtttttggtatgagttatgtggttcgaggagataaatagatagagagaggaatattgatgcgtgtgaaatgttggtaggtgagtgggaggggtttgggttggtgttgagatcggagatatattttgttgttatattttttagggttttcgggggttagtacggagggttatgattatgtaaattgggatttaaatttaattttatgtaaatataattttatgtagaggttagggatggtagaggataagtttattgtagagaaagaaagaaagatgggtaatagttgtagaatttaatttatagataggttttgtttgattagttttgtatatttttagtttattttttatttttttgagatagggttttgttttgtcgtttaggttggagtgtagttgtatgatttcggtttattttaatttttatttttcgggtttaagtaatttttttgttttagttttatgagtatttgggattataggtgtacgttattacgtttggttaattttttgtattttgagtaaagatggggttttgttatgttggttaggttggttttgaatttttgattttaagtgatttgtttgttttggtattttaaagtattgggattataggtgtgagttattgcgtttggtttatttatattttgttattggttttagaatttttttttatttggttttttaaattaagttttgattatgtttgtttttgagtataatttttgatgagtagtattagagagagttttacgttattcggggtttggtatttaaagtatttagtggtttggtgttatttaaagtttgtgagttaggtaggaagtttataaaattagagatggatgaatggatggatgggaaaaagtaagtaagggaggaaggaaggaagaaaggaaggagttttgggaagagagagaggttgttttcgtagggtttttagtttgaaggagaggtgtagtatatttagaaaaaattttcggttaggagtggtggtttatatttgtagtgttagtattttgggaggttaaggttggtagattatttgagattaggagtttaagattagttaggttaatatggtgaaattttatttttattgaaaatataaaaattagttaggcgtggtggtatttgtttttatttagttatttggggggttgaggttagagaaacgtttgagtttgggaagtagaggttgtagtgagcggagattatattattgtattttagtttgggagatagagtaagattttgttttaaaaaaaaagaaagaatttcgtgagtattttaaatgttatatttttataatgtaattagattcggttttttcggatttaggggaagggtcggagtttagtgggtgagtaagaaaagttacgtggaagaagtaagcggttagatggtttaaagataaatttttttttgtttagg

SEQ ID NO: 160 - DNA, 7819 bp, Artificial Sequence
  chemically treated genomic DNA (Homo sapiens)
tttgagtaggggagagtttgtttttgagttatttggtcgtttattttttttacgtggttttttttgtttatttattgagtttcgattttttttttggattcgggaggatcgggtttggttgtattatggggatgtggtatttgggatgtttacggagttttttttttttttttgagatagagttttgttttgttttttaggttagagtgtagtggtgtgattttcgtttattgtaatttttgttttttaggtttaagcgtttttttggttttagttttttaagtagttgggtaaaggtaggtgttattacgtttggttgatttttgtatttttagtagagatggggttttattatgttggtttggttggttttgaatttttgattttaggtgatttgttagttttggttttttaaagtgttggtattataggtgtgagttattatttttggtcgggagttttttttgagtgtgttgtattttttttttaaattgagagttttgcgggggtagtttttttttttttttagaattttttttttttttttttttttttttttttgtttgtttttttttatttatttatttatttatttttaattttataaattttttgtttggtttataggttttgagtggtattagattattgagtgttttgaatgttaggtttcgggtaacgtggagttttttttggtgttatttattaaggattatatttagggatagatatggttaaaatttggtttgaaagattaggtaaaaaggaattttaaaattagtaataaagtatgggtgagttaggcgtagtggtttatatttgtaattttaatattttgggatgttaaggtaggtagattatttgaggttaggagtttaagattagtttggttaatatggtaaaattttatttttatttaaaatgtaaaaaattagttaggcgtggtggcgtatatttgtaattttagatatttatgaggttgaggtaggagaattgtttgaattcgggaagtagaagttggaatgagtcgagattatgtaattgtattttagtttgggcgatagggtaagattttgttttaaaaagataaaaaataaattaaaaatgtatagagttggttaaataaaatttatttgtgggttaggttttgtaattgttgtttatttttttttttttttttgtagtgagtttgttttttattatttttgatttttgtatagagttatatttatatagagttaaatttaagttttaatttatatgattatggtttttcgtgttggttttcggggattttgaaggatgtgatagtagagtgtgttttcggttttagtattaatttaagttttttttatttatttgttaatattttatacgtattaatgtttttttttttgtttgtttattttttcgggttatatggtttatgttaaaggttgttgggtatttgtttatgggtgtgcggaaagttaagttgtttgtcgatagtaggaagggggtttggtttgggttaagtatgaatttggggtgtagggtttgaagttgaggtagattttttaggtagagttgatattagtttcgtaggtatttattatgttatatgtaaaaaatatttttaaggttatatatatttgagaaaggtagggtaaaagagttaagtaagatttttttttttttttttgagatagagttttatttttttgtcgtttaggttgaagtgtagtggtgtgattttagtttattgtattttttgtttttagggtttaagtgatttttttgttttagttttttgagtagttgggattataggtatgtgttattatattcgtttgatttgtttgtttgtttgtttgttttagtagagatggggttttattatgttggttaggttggttttaaatttttgattttaggtgatttttttaatttggttttttaaagtgttgagatgataggcgtgagttatcgtatttggtttaagtaagattttttattgtaggattttaaaaattttttagtaaattttatttatattattaatttttagatatggggattagagtatagtataatatattgtttatatttttttggttatgggatttattttatatgttttataaaaaatttagtagggttgtagagttagagttttttgaaatttttttaaggttatttaaggggtaataagggttgtggtaaggattagatttcgttttttgtagttaatatttgtttttaggagtcgggttattgttttttttttgttagtattttttagttataatttgttttgggacgggttggagtattttagtatgagtgggagatgggcgtttttagagtaggattgtgtgttgttttaaggagttttaggagtttttggagtataggagtagggttttaggttcgggaattggaaggttgagggtggggtggaggttagggatagtagttattatgtatagaggtttaggatagggttatgttgtttagatttttttagtttaggtttgttgagggttttgtagaattttggggttgatttttttggttttttttttttttttgggtatttaataatttattttatttttagaagatttagtaggtttggtaaggaggatgtttaagataggggtttgtttataatttgttgtaatatcggtaagagagagttagggaggtttttattgtgtttttagttttgggaggtatgtttggtttataattgttgtttcgtaataatttgtttgttgaatgtaaaataaaagtaaaatgatttttatttgttttcgcgtgttttttttttttagggattttggtagtatttgagagtaaaaggagaagtatagtaaagtttttggtgatagaggttttttttttatggttatattttttgtttttttatggttttgagggggattaagtagtatcgtgatttggggagtggggaaaagagacgattgagggggatgcgggttcggagttagattggaagattcgaatacgtatgggtagtttttttttttcgtgtatgggtttgtaatattagattagttttagaatgggtttttttataattttttttttatttagtttttaggaaatgcgaatgatttaagttaagtaggagaattgtagttcgttgaaaaaggtataggtttatttgaaagtatttgtagtttagtgatattatttagttattattatttttattttttttattataggtataaatggtggggaatttgattatttatattgaagtttttaagggttgagggaggagtatatagatattgaggaggaaaaagatatttcggtcgggtgcggtggtttatgtttggaattttaatattttgggaggttgaggcgggtggattatttgaggttaggaattcgagattagtttggcgaatatggtgaaatttcgtttttattaaaaatataaaaaattagttaagtgttttggtaggcgtttgtagttttagttatttagggggttgaggtaggagaattatttgagtttaggaggcggaggttgtagtgagaagagattatattattgtagtttagtttgggtgatagagtgagattttgttttaaaaaaaaaaaaagaaagaaagaaagaaagaaagaaaaagaaaagatattttgtaggattgggtatggtggtttatgtttgtaattttagcgttttgggtggttaaggcgggtggattgtttgagtttaggagtttaagattagtttgggtaatatggtaaaattttatttttattaaaaaaaaaaaaaaaaaaaatttaaaaattagttgggtgtggtggcgggcgtttgtggttttagttatttaggaggttaaggtaggagaattatttaagttcgagaggttgaggttgtagtgagtagatcgcgttgtggtattttagtttgggtgatagagttagattttgttttaaaaaaataaaaaagatattttgtaggaagtgttattgaatggagagtttttaggttgaaattttattatttttataattttgtagttagcgagtgttttaggagtagaatagatagtattggaagttatgtatattttatagatgaagagggatgcgttgagaggtttttattttagtattattgttttttatgggtagttggttatagggagggaaatagagagagggaagaatatttttttttaaaagtatcgatagggttgggtgtggtgatttatgtttgtaatacgttttgggagagtaaggtaagaggattgtttaaggttagaagtttgagattaatttgaataatatagtaaaattttgtggggttagttaataaaagtaaaaaatgaaaagtagttgggtatggtggtttatgtttgtggtttaaattatttgggaggttgaggtaggaggatcgtttgagtttgggagtttaaggttttagttagttatgatagtattattgtattttagtttaggtaataaagtaagattttgttttagtaaataataaataaataaaatgaataaaaagtagtgatgttttggaaagatggagtagatgtatttatttattttgttaagtataattgaaaattttgaacgtgataagataagtataagaagattgaaagatggagagaagtagattggttaggaatttcgggatttaaggaatggtggtgaattttttgggatttttttttgttttatatattttaggttgaatattggagaagttaataattgaaaatgttaaggggtataaataagaaaaagttttaatagaataagttttagtaaaattatgtttttttagttaaagaacgaggaaaggggtattttagaaagatagagtttttttagtttatatttgtttcgttttatttaagttttattattatttttgttagtaaaggtcggatggaaaatttagatatttatttttattaggttgtaataaagaattttaggttatttttatatttagttagagtgatgttagagttggagttgggatatttttttttattgggattattttttttcgatgtggtgttggtggaaattatgtgggtagtttggatatttattgttattttaatgtagaaatgaggtattttattcggttttattggagtagtgttaaagggggtttggtggagagttgggattttcgttattatttagtggtaataagtatttttttttttttgttatatatagtgttagtgaaagttatatagggagtagtaatgaagtattttttttatttttagttagggagttgttatggatttttagtggggaatttgaatttttatttttattaaataataatatggaggttttattttttttaattttttaggtttaggaaaggttggatggagaatttggatttttatttttgtttggaagtaattaggtagtgttttattttatttcgttggagtagtataaagggaagtttattaaaataaaatatttaaagaagatttagaattttataatatagtgtttagaatattttgattttaatggtaaattatttgttatattaggaattaggtatttttaaattgaataataaaagataattaatagatataaatattaagacgatatagatgttagaattatttgataaagattttggagtagttattataaaagtgttttattgagaaattataaatgtgtttgaaataaataaaataataaaaagtattagtaaagaaatagaaaatataaagaagaattaaatggaaattttagaattaaaaaatataattaaaaaatataagagttgaaataaaaattataatggatgggtttaatagtagaatggagagtatagaagaaagaagtagtgaaataaaacgtataataatagaaattatttattttgaataatggaaagaaaatagatgaaagaaaatggaataaagttttaaggatatgagtaattataataaaagaagatttaatattttgttattgaagttttagaaggggaggaaaaggagggtgggttttaaaaaaatattttaagaagtaatggttgtaaattatttttatttgataatatatacgtataatatatgtttatagatttaagaagttgagcgtattataaataggataaatttaaagaaatttatgttaagatatattatagttaaatttttaaaaataagaggtagagaaaattttcgaaagtaattatataaaaatgtaaaaaattagttagttgggtggtgcgtgtttgtagttttagttatttaggaggttaaggtaggaggattatttgaatttgggaggcggaggttgtagtgagttgagattttgttattgtattttagtttgggtaatagagcgaaattttgttttaattaaaaagtaaaataaaataaaaataaaaaatttttggaagataatataggagaaaatttgtgagatttagagtttgatgaagtgtttttagatatgatattaaaggtatgatttttaaaaaaattaatttaattttattaaaattaatttttttttgttttgtaaaagatttagttaagagaatgaaaagataaattatagattaagagaaaatatttgtaaattatatatttgataaaggatttttatttagaataaatatataaagaatttttaaatttaatatagaaatattatataaaaaaattaaattatttaattagaagattggtaaaagatataaagagaaattttatttaaggggatatatggatagaaaataattatttaaaaagatatttaatattattagtttttagataggttaagattatgatgagatattattattaatatttataagaatagttaaaataaaagatagtattaaatattggaaagatgtatggaaattaaattatttatatattgttagtgtgaatataaaattgtttagttattttggaaaaaagttttaaaatagtttttttaaagattaagtatagaattattatatatttttgtatttttatttttatatatataattaagagaaataagaatatgtttatttagaaatttgaatataaatgtttatagtagtattatttatgaaagttaaaaagtagaaataatttatatgtttatgaagagatgaatgaataaagaaaatatgggagatttaaataataaaatattatttgataataaaaaggaatgaagtattgatagatattataatatggatgaattttttttcgagatcgagttttatttgttgtttaggttggagtgtagtggtgttatttcggtttattgtaatttttgttttttaggtttaagcgatttttttgttttaattttttgagtgattgggattataggtattcgttattacgtttagttaattatttatattgttagtagagacggggttttattatgttggttagattggttttgaatttttgattttaggtgatttattcgttttggttttttaaagtgttgggattataggcgtgagttacggcgtttggatatggatgaattttgaaaatattaagtgaaagaagttaattataaaatgttatatattgtatgattttatttacgtgaaatatttagaaaaggtaaatttgtagagatagaagtagatgtagcggttgcgtagggttggggtggggtgggaaaggtaagaggaaatgaagagtgattgttaatggatgtgagattattttggggtgatgaaatgttttaaaattggttgtggtgatggttgtataatttagtgaatagatttaaaattatttaattg

SEQ ID NO: 161 - DNA, 18585 bp, Artificial Sequence
  chemically treated genomic DNA (Homo sapiens)
ttggtttttgtgttgttttttttttttttttagggagagagttttttgattagttattgttttatgttggatggatagtttgatgggtgtattttttatgataaagtaggaaattgatattttggtttttgtgagagtttttaaggtgaattttttttaagaagtagattatttttggaaaagttggtaaagtggagttttagggttgttaagttaaggatttgattttggtttttatttagtagttggttttttaatttgttgtaaaaggagtataaatgttatagtgaggtttaataagaatttatagtatttttaatttgttatggttataaattgtatttttaattattgtattattttgttttaattttttttatatatatatattttggtgagttaaagtttgttttttttatatatatttttatatttttttttatgtgttttatatggtaaatttatgtttaggtgtaagttattaatattttagaataaagtatttatagaagaggaagaatgttgaatattgggtatttattttttgtaaatattgtattgttattttataatgataattttaatttttattttagttttgagttggaattaatatttttaagtagagatagttgttttaaaatgttttgtaaagagaggagaggtattttttttatatcggatgttttttatttggtgtatttttagtgggaatatatgaaaggtttttatgagttaggttttataagtatagagggtaggaaatagagtattgggattatatgaaagtagaagaagaatattggttttaggaaggttagaatgggattagaatataagagttaaggttttgtttttgtaaaagagattataaaatttttaagtgagaattttaattttttaaaaataaaaaaggttttttaaaatgagatatgttaaaagtattagaatttttttatttaaattgtttagagtgtatgattttatgtttttatatatatattttttagtatagttataaggaagagaaattttaatattatgtttttattgttgttgttagtttttgagaatatgaattgattattaataacgttatgaaaaataaatagtatagagggatagtgataatgggagagtataaaagataagagaaaaaaataattttttttttattatatatgaattgtttttttattgtttattttatggataaatatatcgggtaacgagatgttggaaataaaaaggtaaagaagttatttttttattatggtgtaaggtttaggaaggtagggatttttattttgttttataaattattatgtttttagtatttagttttatttttggaatatggtaaggatttaatatattagttgaataaatttttgaatattattttatggaggagaagatgatattatgatgaaaatatgaattatttatgtttaatttttggtttaagttttaaacgtaggtttggtttgtttgatgatttagagaaaatgttatattttttgtggggtatttgatggtattatttatgtatttttttttgttttgagtataaggaattttttttttttttttttttttttgtatgggtttttatattgttattaaaatttagtttattgatgattgttttatggagattttttataattaattaaattggaattattattttgttttattttgtgtatttgttgtaatgaatagtaattggtatgatggtaatattagaaaaattttatttaaatttatttagattttttttttgttttttttttcgattgttatttttttttataatattttattttttatttttttttttattggttcggttttttatagggtttaagatttattattgataatttttaatttttgtaattttttattattgttaaaatatttgttatatgaaaattttttaatatttaagatacgttaaatgagtaatgagtaaatgatttatttttatattatagaatttaagagattgttgacgttagtagatagaatattgatttgataattttgtgattttgtttttagaaggagatttaattagttttgtgaatttgggttatttaatttgtttatgttgttttttttttaggtgtaagagtgagagtttgtttagaatagtgtttttgtaagtgcgtatgtgtgttttgtaatattagttttgaatatgttatttaaaaatatgttttgagattatatttattttagaattgttatatattatttttttgaatattagaaagttgaaggttttgataagttttgaaattaataaattgttttttttgatttaatagattttttaaaggtagaggtagtatattggtagttttttagagaatttaatgaggaaattattagttgaattttttgaggagtttggttgttattgtaaatttttgtagttttaatgttagttattgtaggtatagaggtgaatagggtaagatttttgttttttaggtatatagaattaaatgtgggggagagatataaataaatgtgatatagtggtaattgtagatttaaggtttgtttaaataataatggatttgaggattgagaagtaagtaaatttgtttagagtgggggtagaggatgaggaagggaaggttttatagggatgttgtaatagagaaggtgggaaaggatattttaggtagaaggaataaggtataaaatttaaaggtgtgttttaggtttgggaaataattttgtggttatggagtttagaagtggaggttgtttaggaagaaaggggagggataaaattttggaaagtgggtggaggatttgtttgttgtgtgttgtaaatgttattttaaggaatttgaattttattttgtaggtaaaaggaaaatatttttagattgggtttttattattattattatttaattaataagtattttttaaaaagaattttaaagtgttaaggtagagaggaattgggagaaattgttagggaaattaatttttattttattgatatagtttaagtaagaaatgataaaggattgaataatgaaatgtaaaaggatgagatggaagaaatagttttgatagtaatttaggagttatatagattagtaagagtgattggatggaaagaaagagaaatataaaatatttgtataaatttagtttgggagagtgttgtgtgattataatattaataggaataggaatttttaggagtgaattgttttatataggttttgaattagattaggggttttattatatagttatttttttgtataaatatatttattgatttttgtgttatagagtttaagagtgatttaattaaagattatatagtattttttttaaggatgtttagtatttattaaaatatttattttaaattaaaatttggtagtatttaatatattttttttaataaagtagtatttaaatttgtaatttttttttaattttagtttttgataaataattatttttgggattatgaattaattttggtttttatttaatttgaaattatttttttagttttggattattttatatataaaatattttaatagaaggttgtgaaattatttattttttagtaggaaagagaatataaataattttagtgatgatttatatattaagttattatttttggaattaattttaaatttggtttttaacgttatatattattgttgataatgtattaaaatatattgtatttgtagttagggagtagaattgttttaaaaatattgtatgttagtgaaaattagaaataatattttttttttgtaaggagtttatgtttgtttatcgtgtaaaatttagtaaagattttaaagaataatttttttaataattttttaaagtagagggtttttttatttagggggagaagaattttttttgagaggtaggatgtggaaattaatatgatttaggttgtttatataaagtagtttatatttttttgatgatgtcggagtattttgtttttatttgagatagttgttttttattagtattagaaataaatagtaaaatttatggttattgatttatgattatttttttattttgaatttttttgttcgggaggatttggaatttagaaattgagttggtggagaatagttgttgttagatataatttattagaggaaggaaattatagtgtttattttaaaaataaattaagttattagaatgattacgtattataaaatgaaaataatgttgtagttagtgttattttatgatttttttttttttgtattataaagaaataaagataaaaagtaaatggttttattatgataggtaaggttgtttttttttttgtaatttttgtggtgtatttacggtagttttggaatttttttgaaataaatttagatgttttggagggtagatatatgtaatggttattttattattttaggtttaatgataataggttgttatgtttaagttttgatattttgtagatttttaaatgtattttattgtatttagaaggaattttgtagtattgagaaaatgtaatgtaaaaatgagtagagatataatgtttatttaatttagaataaaataattttatttttttatagttgaaatggagggcggggaagttaggtagtggtttttgaaagttaagaatttagtagtattgtgttatttttttgtttgatttagtgttattttttttatttgatatttgtttattttagaggaggtagtttttgagaaaggattataaatattttggtttagtgttttaggagttatgataagtaaaggaatatatttgtttggagatagtttttgcgatatttaaatgtgtgagttaatagtttttgagatatttaaatgtgtgggttaatagtttttgcgatatttaaatgtgtgggttaatttttttatttagtttaataattttttatttttttttttatttttttgttttttttttttgttttgaagtcgtggatatagaaatttttgtaggtaagttgttttagagtatattgtaggataagtttgtaacgaatagttaaatttacggtatttggatttttaattttttttcgaaatggtaggtgtgagtgtttgtataaaatattttatgtttatttttaattttttgttttgggtaagtgttttttttttaattattaattttatgtaagaaaggggattttgatataaatattataaataagaatagattgtatattagagaaataagagaagggggaaaatgtattttttatgtatttgtttggatttgtttgttttttttttggttattttagtaattgaaaatgagttaaggatttaaaaaagtgtattttagaatgtgaggataaatattttataaatgtttttatattgttgtaaaaaaaaattatagaggaatataaatgttttttaattaaaggataattttttttagttgtatattaagtaggtttttttaatttaaggattttgtggtaaaaatatggtttgattttattcggagttcgggttttgattttcgttttttatttttgggtttgaataggtgaatcgtagggtgtgggataataaagattatttttagagttttaaagataaaaaaaatgggttatgaaaaatttgagggggaaatgataaaatttttaaattataagaaaattaaattaagatcgtggatatatatatgtattggtattttaaagttagtattttgatgtgttattattttattttttaattgataggatttgtattttagtaatttgttatgttttttttgaaagtttattgatatagatataattaataaattgataattgatatttattaatagataatggaaaaataaggtatgaaaagagtaggttgggatgttgggatattgattttattatttttagtatatatggtataattaaagattgtttaaatgttaattagtggaaatagtataaagtatttaaatgaaaaaagtattttgtatattggattaaaagttattttatttattttaaggatgaaagaattttggttttgtttttgtatttgatttttagtaaatagatattttatatttatgtgttgttatatttttgttttattaaaataatgatgaatttaattaaatttaattatatgaatatagttttattgtatagattgattttttatttaatgattagtagtgttaatgagtataaatggatatattggtgatttttaaataagtaagtaaatatttaaaaaagtaaaataaagaaggtaaaaaaaatgggttgttgtttttaggttaaaaaaatgggttgtttttgtaaatatttaatgtagtttatgttatatatatgttagttttttagttagttttgatatatttttttttttgagatatttaaattgattaaatattgggagtaggttatataaaaaaagaaagatttgtattttttggttttgttttgtttttagttttttttttgtttgttttttttttttttttttggagaattttgaatatttattaaagaagataggataggtaattaattttattggttagtttaggtggttatagaaagatggttaatttttttttatttttattgtatttattttttttattttatattattttgaagtatattttagatatataattttgtttgtaagtattttagtatatatttttgaaatataataatttttgaaaaaatgtaattataattaggcgtagtggtttacgtttgtaattttagtattttgggagatcgagatgggtggattataaggttaggagtttgagattagtttggttagtatggtgaaattttgtttttattaaaaatatgaaaaattagtcgggtatggtggtacgtttttgtagttttagttatttgggaggttgaggtaggagaattgtttgaatttggtagggggaggttgtagtgagtcgagttcgtattattgtattttagtttgggcgatagagtgagattttattttagaaaaaaaaaaatgttattataatattattattatattttaaaaatttaataagaattttttaaattaattgttaaattgatttgataattttaattaaattgttaaatttgagtttatttagggttgaaattttcgattattttataaatgtttttgttagaattaggatttaaataaggtttatattgtgtggttggttaatatatgttttatgtttattttaatttgttgatttttttttagttaatatttttttttttttttattgaaattttatgtattggtgtgtgttgtttgttttattatattgtttatagtttggattttgttgtttgtatatttgtggtgtagtttgatataatttaaggtttttttttttttatacgataattataagtgattttgtatttttttatgaggaggtattggaggtttgattgtgttttttttttgtgacgttcgtagttattgatggttaagtgttaaaatttattattagtttattaagtggtttaaagtgatgatattttagttttattaatttttttttttttattagttggaatattttttataaggagaaattttttatttattgtttaattatttgggtattttatttttaatattttttaagtggtataaaatattttttttttattttttatttattagattgtaagtgatgagttaagttattaatattatttaatagtgataagttagtatttttttaagtatttttatgaaataatagattagttttattataatgtttatttttattaatgtgtaatttgttttatttttggttattaggagtttttttaaggtgatttaagtttttttgaaatgattttaataattttgatagtttttttagtatttggtttgatatgttttagattatttgtttattttttgtttagatttcgaattagttatttttttattaagttttgatatttgtttttaaagagttatagttattgttttttttatgtaatatagaatatatatggtatatttaaataaattaaaatattaatatgttaataaatgtaaggtttttattttattaaagatgttttaaagtattgaaattagtagtaatttttaaataatgaaatagttaaaatatatttttgttgtattaaaatattttggaaagtgttaatagttattatgaagatattagaggttagtgttttattaaatagttaattagaaatttggaatagatttaaattattaaaataatagtttaggaaggggtaggttatagatttaggattatttatttatttattttgatagggtttagggtagattgtagaggtttgtattatgttatatttagatattattattgtttttttggcgagttttgattattattattattattattattattattattattattattattttgagatagagtttcgttttgttgtttaggttggaatatagcggtatgatttcgggttattgtagtttttgttttttaggttttagcgatttttttgttttagtttttcgagtagttgggattataggtacgtattattatgtttagttaattttttgtatttttagtggagatagggttttgttatgttggttaggttggttttaaatttttgattttaggtgatttatttatttttgttttttaaagtgttgggattatagggatgaggtatcgcgtttggttagagttttgattattttatggttatattatttgtttgtttttttgataatagagataagtttttttgatgttgtagtttttagttagatttttttaattaacgtgttttggtgatttttattattagtatatgtggtcggatttataatttttatataagagattttgaaatggagttttttagtgagagtaataattataaaaattagtgataattttttagttaagaggtgatattaatattttaaatttaaatataggtagtaggaggaatttttgaggttaggaaaggtttttatatttattttttcgtttatgtttagttttgagtttttagttggaattttataattttttataggaaattagtaatttgttatatttttaatgtttatttaagtaaaaattttaatgattttattgatgtggtttttttatagatgtttagggttttatgtttttaaatgtattttttttggtataatttgtaaaattgagtttttgtaaagtagagtcgatgttaaaatattttttagatatgtatgtggttatttaatttaaatagattaggtttttttgggggataatttgagatatgttttataagtatatggtgatttttatttgttagaattattaattgaagaaaaatatgtaaaagtgaaagttatttttgattatttatgttagagtttgatgtaagttagagaattggaggtgttgtagataatagataaattataggtacgaaatttatttttttagttttgttttaaaaatagatgaaatgttttaattttttaatgttttttttagatagtttaagtttaggaatatcgtagatgtttatggtgttttaggggtttgagtaagtatgaaatatggggtttttggttcgtggatgtagtagaataatgattagagatagagagttatagagaggttagtttttaatgagggaaagaagaatgaggtatattattaattttaaatgagttatagggaggagttaaattgtaaagttgaatgtattagtaattgaaggaagttagtgtatgacgaggtttgaagagcgtagaaagaagtttgaatttggagagagtttaggatttagtatttcgatatttattattgtattttattgagattggatgtgttgagagtaattaaaagattggaggtaaagtagatataattttgagatggtggtatattaaaaggaataggatataattatattttattgtgttcgttgatggaattttttaaaatgaagatttaataatggttgaagtgtatgaattttgtaaatatagtggttgtttgattttatgtaattagtatggagttaaaatagtattaaaaggtattagagtttattggttgatagagtaggataaatattagtttttttattagtagttgtgtttttttggggaaattggttaatttttttgtgttttatttgtttttatttgtaaaaatggggatagtagtagtatttattttatgggtttgtggtgatgattaaataagttaatatatataaagaagtaggaattaattagataaatgtttaagaaaaagatattttaattagtattttataggtgtttttatgaagtagaaatatgtaattatttggtatagtgatgaataaatttaaatgttgagttttaaaacgaagaggaaataagatagtaagaatatgataaggtagaaatttttttattatgaattaagggaatggggaaaaagtggattttgtaaatagattgattgagattttaattttgaatttatttttttttgttttggaatatgttttttggtttttgtatgttttagtttttggatttgtaaaataaaaatgattattttatttggtaggattaatttgaaatattaattaagttattttatgaaaatttgtaattaaggattgattattaataatagtataattaatatgttttttttgattttaaatatcgtaattgtttttttatttataattattagaatatattgtgatagtattttatatataatgggtttttaaatggtaaatataattttagttttattttgattttttttttattttatagggtgaggtatatgtaggagtagagggatatgttagttttaaggttggtttttattttgaatataggatttaaatttttttgtttaaatgttttgagaattttaaattaaatttttttttttaggtgattaagtgggtatatttgttaaggtaggaatataggatatatgttgtttgtgtatattattttgagttataattttttgatataatgttttgtggtttgtgggttgttatttgtattttttttaggttttttaaatggatgtataggtttataattgttatttatatgaacgttatatttttgaaataatatggtaagaatattattgaatttgtgttattttttgatttagaaatattaggatatagattaaatgttaaatatttatttttttttatatgttttgaatgtaggtttttagtggttattgaggttttatttgtgtaaggaaaataatgtggttgatttattttttttaaatttagagttatttaaaaattagaatttgtagtagttatattgagtgtttgttagaagatgtatatgagattaggcgcggtggtttatgtttgtaattttagtattttgggaggttaaggtgggtggattataaggttaggagatcgagattatttcggttaatacggtgaaattttatttttattaaaaatataaaaaattagttgggcgtggtggttgatatttgtagttttagttatttaggaggttgaggtaggagaatggtatgaattcgggaggcggagtttgtagtgagttaagatcgcgttattgtattttagtttgggtgatagagtgagattttattttaaaaaaaaaaaaaaataagatgtacgtgaatgtaattatggagatatattgagtgtatatttaatatttgtattagtttgtttttatattgttgataaagatatatttgagattggtaatttataaataaaaagaggtttaatagatttatagttttatgtggttggggaggttttataattatggtggaagatgaaagttttattttatatggtggtaggtaagagagagtgggagttaagtgaaaggggtttttttttataaaattattagattttatgagaattatttattattataagaatagtatgggggaattattcgtatgatttagttattttttattgggttttatgggagatataatttaagatgaaatttgggtgaggatatagttaaattatgttaatatttaatataataaatattattaatatagtattgggggaacgtgtttttagtattttaacgtaggttttattttttataagtgttagttggttgagaaataaagagaaatagtataaagagaagaattttatagttgggttgtcgggggtgatattatatattagtaggatcgtgatgtttatttgagttataaagttagtaagttttattaaggattttaaaaggggaaggggtataagaatagggagtaggttataagattatatattttaaagggtaaaaaggagaataaagattatatgtttttgaggaaataggataaggacgaaattagaaatttttgataagggtttaaaaaagattataaggtaaagggtaaaagtaaagattataaggtaaagggtaaaagtagaattattgataagggtttgtgtttagcggtgtatgtgttgttttgataaatattttaaataatagaaaatagggtttgaaagtagagaatcggtttgattttaaatttattagggtggagttttttaattttagtaagtttgagggtattgtaggagattagggcgtattttagtttttattttaattatataagatagatattttcggagaagttgtttatagatttttttgtaggaatgtaattttttttttatagtattaatattaatatttttttttaggaaaagaatttagtaatattttttttatttgtatgttcgtttataggttttttgtaagaagaaaaatatggttttttttgttcgattttataggtagttagattttatggttgtttttttttgttttttaaaattattgttattttgtttttttgtaaggtgtattgattttatattgtttaaacgtatatgttttataattaatttatatagttaatataattattatagggttttgaggtgacgtatatttttagtttacgaagataataggattaagagattaaagtaagataggtgtaagaaattataagagtattatttaggaagtgataaatgtttatgaaatttttataatttatgtttcgttgtcgcggttttagttagtttttttgtttggggtttttgattttttgtaataatatggggttgaagattttttaaaaattatgattgtagagtttgttaaaagttgaagattttaatttattttgttggtttatagtattagaaaatttaatatcgtatgaggtttagtagattagaattatattaggttatgtttgtaaagggaatgtatattttattttttttttttttttttttgagataagagttttgtttttgttgtttaggttggagtgtaatggcgtgattttagtttattgtaatttttatttgtcgggtttaagtaatttttttgttttagttttttgagtagttgggattataggtacgtgttattatattcggttaatttttttggtatttttagtagagataaggttttattatgttggttaaattggttttgaatttttgattttaggtgatttatttgttttagtatattttattttgaatgaattttaaattagaattggttttattttttttaaggaaatttagtataagatttaataaaaaatattgttgaataagtgaaagatattgttattttgaagatttagaggataagtatatatttttgaaataaatattttagaattttgaaaaaatgtatgtagaaattggtatttataatgtgatgttagaaagtaattttttatgaaatagtgaatggaggttataagagaaaataaaatttattggaaaataacgggatgagataaaaagggaaatggataaaatatgtaaggattgtaagtaaattataaatataatagtagaattaaattttattgtagagattatattaaataaagatagtgatatagaattttaaattgataagtttttttataggaaaattaaataagaaattagaatattgtgaaagaagataatagatatagataatagagaatggaaatttaaaataagttgtatttttgaaaaagaggataaaataaatggaatataaataataattaaattaatatatggaaattttgtggagttgaaaatatatttgtatgtagatggtaagtgtttgatttattttagtgaaagaagatatttatgtttaaataaatgttaagaaaattattaatttagttaaaagataaataaatattttataaatgtttagatataattgataaaaaagaaaataagtaaataatgtatgaacgaaaataaggttggtgatattttttttttattgtaattttgaaagttagaagataatgaaataatgtttgttgagtatttagagttttttataaatgaataagagagaaagagatttttaggtatttatattgtaaaatttattgaaatatatttaaaatgattaaggtataagtaaaaatggataattgaagtatgggaaaattatggttaaatggttaattattttaggtttggaaataaagaagttatatgtttaaatagttatattttttattattttaaatgtagattggaaggatatttggaaagagatgtaatagaaaatagtaatttagtaatatttattttgcgttaaagtttaagattgattatattaaatagtatttattggattatatggagggaatattgttagagatatagaatagtaaatgtaaattttattaatttagtttaatataatttaatttgttttttagtttttgataatttaggaaggaaaagaaaaaatatggatataggggatttaaatgatttaatgaataaagtatatttattaaatttttaataaattttgtatttttttgagattttgttgttttttttagtatttttgaatttttagaaattgatgaaggaaatgtaaaaaaatttataagtaataattttatagtttgtatttttttattataatataattgaattaagatttttaaataaatgtttagtaaaagaaatttgaaaatgaataataatagtagtagtagtagtatagttttagtatgttagggttttcggaatttttgttttttataattatggagtcgtttttagtgttttgtgtttattataaaaataaattttgtagttatttatttgtatatttttttatttttttttatttttttaggagtagtataagaagagttttttaagtttatttaaaaggtgtttattttgggattaataatgatgtagtttaaaatttatttttttttttaatatagtatttttagtattttttaaatatattttaataaatattaaataaaagggtataatttggagggaagaagtagggatgattggagatatattattaaagaaaaggataaattaatattttattatttattttttttttggatggtattttttttcgttttttttttttttttgatattttatggtttttagtatttgtttgtttttagttatttgtttgggtttttataataagatattgtagattgggtggtttaaataatagaaattaatttttttatagttttggaggttaggaaggttaagattaaggtgttagttaattgagttttcggtgaggattttttttttgtggttatttttttatgtttttatatgttttttttttgggtatgagtagagaaagaaagatttattttttataaggttattagttttattagattataattttatttttatgattttatttaattttaattattttttaaaagtttattattaaaaatagatatattggaggttagggttttaatatatgaattttgtggagatataatttagtttattataagtaaatattaaaattgtttaattttttaggatgttggtttagattaattgtatttaaattttataaaatgatggttgttttatgaaagttgaatgaaaattagaataatttttaaagagagattagaagtaggggaaaggtaggtttagttagttttatagggttttggaattattatattaatttattttatttttataatgttattaacgaaagtagagagtaggtatttatttattaatttatatttttaattgtttaaaatagtataaaaatattaggggaaaagttttaaaagttaaatttggtaaagggttttaagtattattatgatggttaattttttaataatgggatgaaatagtttagtattatttatgattttaggatggttatttttgatagaaaataaattgatttttaaagttatttaataaagttacgaataattttatgatattagattgatatttatatgggaatttttttatttaaatgagaatgatatattttaaatatttgttttatttttaaaatgaagtttgaagaaaagataagagttaggggtggaaatgatattttggttaattttaaagtttttgagaaagattgtttaattttgaagattagttgggtaaaatatttttgatttttgaaataattggttatttttttttttaaatgttaatgttatagaaaatttttagtggttgagaagattaaaagttgttatttgaggggtagatatgattgatttaataagatttatgaatgatttgatatttaaatattttgaaaaagtgaatagtgatatacgaataaaaaaagttttaaaaaatattatattgagtttttattaagtttttattaagaatttttaaagttttttcgttgatagtttaataaatattaggaaagaatgttatttataatagttataaggtttattagttatagatgaaggttagaatgattattaagttaattattatgaatttgtttgtgaaaagagaagaaaacgaaagaagataattagtgaataaattaaataataaataaaaaatttagttggtatgaaattattgaaaattttagagggttttattattatttgatataaattattatttataaattgtttaataaaggattgttaaaatgagtatttgtttttgtttgtaaatgaaattagaattttgtgaaaggatgttataaattttagggttagagaagtaaggaaagtttttaaatacgaaagttgtgttttttaattatttgtattttatggtgtgtgtgtgtttatgtgtgtgtatgagataattgtataggttatttggtggttaaagagttttggtttttaattgtattagttattttgtaggagttgaagtatgttgtaagggtagattggttaggaattgtttcgggtttttatgatgtaataattagcgtttaggattttaatttttttatttaaaatgagaggtttagatttagatgatttttaaggttttttagggagtatagagtttatggttatttaattatttattgtgttttttattttttaatagagtttttgattttattttttttgtaaatttaatgagaagttattaaaagtgttgttttggggttttaggcgtatgttttaattatgtacgaaagtaatgatgttttaaggatatttgtttgttagagtatagtaaggttagaattgtttattaagttttttaaggtttgttgtgtttggtatgttattagatatagtttttaatatttttatttaataatagatttttgatttttgtttttgaagttataatgtataatttttttttttaaattttgaatgataagagttttttttatattaaagtaaaatgtgttttatattttattgtgttggtattggtttaaattaaataatttggtaaaattattaaaggaatttaagattttaagttttgttttttattgttttttttttgtgagtaaattttattatttaaaagagtttgtttttaagagagtttatttgggtttaaaaagtgttgattattatatagttttgttgtttaattgtatattttgtcgtatgttttattttttttttttttattttaatatttttttttttgtcgaattttaaatgaatggtgattatttcgttattttttttttttttggtttaatatagttttttataaataagtttagaggtatgataaggatattttatttttaaattgttgtgattttttttttgtatgttaaaatttagtagaaatatagggttagagttatatggaaaaataatttttttaggtttaatggaaataattttttgtttatagagttgtgagtgagttgtggatgagaaatagaattatttttattaaatttatatattgtaatttaatattttaataatgatttgtatatgaatatgttttatttatgttttttaggttgtgatagtatagtcgatgatgaattattgttatcggatagataggagggtgtggaaatagagttttatatgattttaattgtattttttttgtttgtttgtttttttttgtagt

SEQ ID NO: 162 - DNA, 18585 bp, Artificial Sequence
  chemically treated genomic DNA (Homo sapiens)
gttgtagaaaaaaataaataaataaaaagaatataattaggattatatgaaattttatttttatatttttttatttattcggtgatagtagtttattatcgattatattattataatttggaagatataaatgaggtatatttatatatagattattgttgaaatgttaaattgtaatgtgtaagtttgatgagaataattttattttttatttataatttatttatagttttatggataagaagttatttttattaggtttggaaagattatttttttatgtaattttagttttgtgtttttgttagattttagtatataaaagaaaagttataatagtttaaagataaaatatttttattatgtttttgggtttgtttgtgagaagttatgttggattaggaaaaaagggaatgacggaatagttattatttatttaagattcgataggaagggagatgttgggatagagggggaaaaagtaaaatatacgataagatgtgtagttaagtaataaggttatataataattaatattttttgaatttaaataaatttttttaaaaataagtttttttaggtggtaaagtttatttatagagaaggaataatgaaagatagaatttgaagttttaaatttttttaatgattttattagattatttaatttggattaatgttaatataataaaatgtaaaatatattttattttagtgtaaggaaaatttttgttatttagggtttaaaaaaaaaagttatgtattgtggttttaaaaataaaaattaaagatttattattagatagagatgttaagagttgtgtttggtaatatattagatatagtaggttttgggggatttagtagataattttgattttgttgtgttttgatagataaatgtttttggagtattattgttttcgtgtatggttgagatatacgtttagaattttaagatagtatttttaatggttttttattgagtttgtaggggaaatagagttaagggttttgttaaggaataggaagtataatgagtagttgagtaattatagattttgtgttttttaaaagattttgaaaattatttaggtttaaattttttattttgaatggagaaattggaattttgggcgttaattattatattatgaaaattcggagtaatttttaattaatttgtttttataatatattttagtttttataaaataattaatgtaattaaaaattaaagttttttaattattaaataatttatgtaattattttatatatatatatagatatatatatattataaaatataaatgattaaaaaatatagttttcgtgtttgaaaattttttttatttttttaattttgagatttatagtatttttttataaaattttaattttatttgtaaataaagataaatgtttattttagtagttttttgttaaatagtttgtgagtgataatttatgttaaatgataatgagattttttgggatttttagtaattttatattaattgaattttttgtttgttgtttagtttgtttattgattattttttttcgtttttttttttttttataagtagatttataatgattggtttaatagttattttggtttttatttgtaattaatgaattttgtagttattatgagtagtatttttttttgatatttgttaaattattaacgaaaaaattttaagaatttttagtaagagtttagtaagaatttagtgtgatattttttaaaattttttttgttcgtgtattattatttatttttttaaggtatttagatattagattatttataaattttattaaattaattatatttgttttttagatagtaatttttagtttttttagttattgaaaattttttgtaatattaatatttaaaagaaagagtaattagttgttttagaagttaaaaatattttgtttaattaatttttagaattagataattttttttaggaattttgaagttggttaaagtattatttttatttttaatttttattttttttttaaattttattttaaaaatgaaataaatgtttagagtatattatttttatttgagtggagaaatttttatgtaaatattagtttaatattatgaaattattcgtaattttgttgaatgattttgaaagttaatttattttttattaagaatgattattttagagttatgaataatattaaattattttattttattgttaaaagattgattattataatggtatttggagttttttattaagtttagtttttagagttttttttttaatgtttttatattattttaaataattaaaagtataaattaataaataaatgtttgttttttattttcgttaataatattgtaaaagtaaaatgggttagtatggtggttttaggattttgtggaattgattaggtttattttttttttgtttttggtttttttttgagaattgttttggtttttatttagtttttatggaatagttattattttatggaatttggatgtaattggtttggattagtattttaagaaattaggtaattttgatatttgtttataatggattgaattgtgtttttataaaatttatatgttgaagttttaatttttaatgtatttgtttttgatgataggtttttagaagataattaagattaaatgaggttatgaagatggggttataatttgatagaattggtgattttataggagataaatttttttttttttatttatatttagggaaaggatatgtgagaatatgagaagatggttatagaaagagggtttttatcggaaatttagttggttggtattttaattttagtttttttagtttttagaattataagaaaattaatttttgttgtttaagttatttagtttatagtattttgttatgagagtttaagtagatgattaagaataggtagatgttgaagattataaaatattaggaaaaaaaagggggcgggggaagatattatttagaagaaagataaatggtagaatgttgatttgtttttttttttgataatgtgtttttaattatttttattttttttttttaaattgtatttttttatttggtgtttattgaagtatgtttggagaatgttgaaaatgttgtgttaggaggaggagtggattttgaattatattattattggttttaaaatggatattttttaggtaagtttaagaaattttttttgtgttgtttttgagaggataaaaaagaataagaaaatatgtaagtggataattataagatttgtttttatgataaatatagaatattagaggcgattttatgattatagggaataaggatttcgaaagttttaatatattaggattgtattgttgttgttattgttattgtttatttttaagttttttttattaaatatttatttaaaagttttagtttaattgtattgtggtaagagaatgtagattgtaggattgttatttgtgagtttttttgtattttttttattaatttttaaagatttagagatattagaaaagataataaagttttaagagggtataaagtttattagaaatttagtaaatatattttatttattaaattatttagattttttgtatttatgttttttttttttttttttgagttattaaaaattgagaggtaggttaagttgtgttaagttgaattaatggagtttgtatttattattttgtatttttaatagtgttttttttatataatttaataaatgttatttagtgtaattagttttgggttttagcgtagagtaaatgttattaaattgttattttttattatatttttttttaaatatttttttaatttatatttgagataataaaaaatataattatttagatatgtgatttttttatttttagatttaaaatggttagttatttaattatgatttttttatgttttaattatttatttttatttatattttaattattttggatatgttttagtaaattttatagtgtgaatatttgaagattttttttttttttatttatttgtgaaaggttttgaatatttagtagatattgttttattgttttttgatttttagggttataataggagaagaatattattagttttattttcgtttatgtattatttgtttgtttttttttttgttagttgtatttagatatttgtaagatgtttatttattttttaattaagttagtagtttttttaatatttatttaggtatagatgtttttttttattggggtagattaggtatttgttatttgtatataggtatgtttttagttttataaaatttttatatattaatttgattattatttgtgttttatttattttgtttttttttttaggagtatagtttattttgggtttttattttttgttgtttgtatttattatttttttttataatattttgattttttatttgatttttttgtgggaaagtttattagtttgggattttatgttattgtttttatttaatgtgatttttatagtgaagtttaattttgttattatgtttgtagtttatttgtagtttttatatattttatttatttttttttttattttatttcgttgttttttaataaattttatttttttttatggtttttatttattgttttatgagaggttattttttagtattatattgtggatattaatttttatatatatttttttaggattttagaatatttattttagggatgtgtgtttgttttttaagtttttagggtggtaatattttttatttgtttaatagtattttttattaggttttatgttaaatttttttgaaaaagatgagattaattttgatttagagtttatttagagtagaatgtgttgaggtaggtggattatttaaggttaggagtttaagattagtttggttaatatggtgaaattttgtttttattaaaaatattaaaaaaattagtcgagtgtggtggtacgtgtttgtaattttagttatttaggaggttgaggtaggagaattgtttgaattcggtaggtggaggttgtagtgagttaagattacgttattgtattttagtttgggtaataagagtaaaatttttgttttaaaaaaaaaaaaaaaaagagtagaatgtgtattttttttataagtatggtttgatgtagttttgatttattaagttttatgcgatattggattttttgatgttgtaaattagtagagtaaattaaaatttttaatttttagtagattttgtaattatggtttttaaaaaatttttagttttatattgttgtaggaagttagggattttaaatagagggattggttggagtcgcggtagcggaatataaattgtgaagattttatggatatttattattttttaaataatatttttataattttttatatttgttttattttaattttttaattttgttattttcgtaagttgaggatgtacgttattttaggattttgtgataattgtgttaattgtataaattgattgtaaaatatgtgcgtttgaataatatgaaattagtgtattttgtaaaagaataaaataatagtgattttagggaataagggaagataattataaggtttgattgtttgtggggtcgagtaaaaagagttatatttttttttttgtagagagtttataaacggatatgtaagtagggaagatattgttaaattttttttttagaaaggaatattgatattaatattatggggaaagaattgtatttttgtagggaggtttataaatagttttttcgggagtgtttgttttatgtggttgagataaggattgaaatacgttttggttttttgtagtatttttaggtttattaggattgggaaattttattttggtaaatttggggttagatcggttttttgtttttaaattttgttttttgttgtttaagatgtttattaagataatatatgtatcgttgaatatagatttttattagtaattttgtttttgttttttgttttatgatttttgtttttgttttttgttttgtgattttttttggatttttattaggagtttttgatttcgtttttgttttgtttttttagaagtatgtgatttttgtttttttttttgttttttgaagtatgtgattttgtgatttattttttgtttttgtattttttttttttttgaaatttttaataaaatttgttggttttatggtttaggtgggtattacggttttattgatatgtaatgttattttcggtagtttagttgtaaaatttttttttttgtattgtttttttttattttttagttagttgatatttatggaaaatagaatttacgttgaaatattgggggtacgtttttttaatattatattaatggtgtttattgtattgagtgttgatatggtttagttgtgtttttatttaaattttattttgaattgtattttttatgggatttagtgggagataattgaattatgcgggtggtttttttatattgtttttgtggtagtgaataatttttatgagatttgatggttttataaggagaaattttttttatttggtttttatttttttttgtttgttattatgtaagatgggatttttattttttattatgattgtgaggtttttttagttatatagaattgtgagtttattaaatttttttttatttataaattattagttttaggtatgtttttattagtagtgtgaaaatagattgatataagtgttaagtgtatatttaatgtgtttttatgattgtatttacgtgtattttatttttttttttttttgagatggagttttattttattatttaggttggagtgtagtggcgcgattttggtttattataagtttcgtttttcgggtttatgttatttttttgttttagttttttgagtagttaggattataggtgttagttattacgtttagttaattttttgtatttttagtagagatggggttttatcgtgttagtcgggatggtttcgattttttgattttgtgatttatttattttggttttttaaagtgttgggattataggtatgagttatcgcgtttggttttatgtgtattttttaataagtatttaatataattgttgtaaattttaatttttaaataattttaaatttagggaaaataaattaattatattgttttttttatataaatagggttttagtaattattaaaagtttatatttaaaatatgtagagagagatgaatgtttggtatttaatttgtattttgatgtttttgaattaaaaaatgatataaatttagtaatatttttattatattgttttaaaagtataacgtttatataagtaatagttgtagatttgtgtatttatttgaaaagtttgggaaaaatataaatgatagtttataagttatagggtattatattaggaagttataatttaaggtaatatgtatagataatatgtattttatatttttattttgataaatgtgtttatttaattatttggaggaaaaggtttgatttagaatttttagggtatttgagtagggaaatttgggttttatatttaaagtggaagttagttttggggttgatatatttttttatttttgtatatgttttattttgtgagatgagaagaggattagagtagggttaaaattatatttattatttgaaagtttattatgtataaaatattgttatagtatattttaatagttgtaaatgaaaaagtaattacgatgtttggaattaggaaaaatatgttaattgtgttattattgatggttagtttttggttataggtttttataaaatagtttagttaatgttttaaattaattttgttaggtaaagtgattatttttattttataaatttaaagattggagtatgtaaaagttaagggatatgttttagaataagaaggggtagatttaggattgaaattttagttagtttgtttataaaatttattttttttttatttttttaatttatgatagaagaatttttgttttattatatttttgttattttatttttttttcgttttaaaatttaatatttaaatttatttattattatgttaaatagttatatatttttgttttataaaaatatttataaaatattggttgaaatgttttttttttaaatatttatttagttaatttttatttttttatatatattaatttatttaattattattataaatttatgaggtagatattattattatttttatttttatagatgaggataaataaagtatagagaggttaattaatttttttaaagaagtatagttattgatgaaggagttgatgtttattttgttttattaattagtggattttaatgttttttggtgttgttttagttttatgttaattatatagggttaggtaattattgtatttataaaatttatatattttagttattgttaggtttttattttgaaagattttattaacggatataataagatataattgtgttttattttttttagtgtattattattttagggttatgtttgttttgtttttaattttttaattgtttttagtatatttaattttaataaaatataatgatgaatatcgaaatgttggattttggattttttttaagtttagatttttttttgcgttttttaaatttcgttatgtattggttttttttagttattaatatatttagttttataatttggtttttttttatgatttatttgggattgatagtgtattttattttttttttttttattaagaattggtttttttatagttttttgtttttggttattattttattgtatttacgagttaaaggttttatgttttatatttatttagatttttaaagtattataagtatttacgatatttttaggtttgaattatttgagaggagtattaaaaaattggggtattttatttatttttgaaataagattagggaaataggtttcgtatttataatttatttattatttgtagtatttttagttttttaatttgtattaaattttagtatgagtgattaggaataatttttatttttatatgtttttttttaattagtgattttaataaatggaaattattatatatttatggggtatattttaagttgttttttaaaagaatttggtttgtttagattaaatgattatatgtatatttaagagatattttaatatcggttttattttgtaaaggtttagttttgtaagttatattagaaagaatgtatttgaaaatataaggttttgggtatttataagaaaattatattagtggggttattaaaatttttatttaagtaaatattaggaatgtgataaattgttaattttttatgaaggattgtaaaattttaattgagagtttagagttgagtatagacgggagagtagatataggaattttttttaattttagagattttttttgttgtttatatttgaatttaaaatattgatgttattttttggttaagaagttattattggtttttataattgttgtttttattgaaagattttattttaaaattttttatgtagagattgtaaattcgattatatatgttggtggtaggaattattaaggtacgttagttagaaagatttaattgaaaattatagtattagaaagatttgtttttgttattaaagaaataaatagataatgtaattataaaataattagagttttggttaggcgcggtgttttatttttgtaattttagtattttaggaggtagaagtagatggattatttgaggttaggagtttgagattagtttggttaatatggtaaaattttgtttttattaaaaatataaaaagttagttgggtatggtggtgcgtgtttgtaattttagttattcgggaggttgaggtaggagaatcgttagaatttgggaagtagaggttgtagtgattcgagattatgtcgttgtattttagtttgggtaatagagcgagattttgttttaaaataataataataataataataataataataataataataataattagagttcgttaggaaagtaatgataatatttgggtgtggtatggtatagatttttataatttattttgaattttattaaggtaggtaggtaaataattttgaatttataatttatttttttttagattattattttgataatttagatttattttaaatttttgattagttgtttaatgaaatattgatttttgatgtttttataatagttattagtattttttaggatgttttaatataataaagatatattttaattgttttattatttgaagattgttattggttttagtgttttggaatatttttaataaaataggagttttgtatttattagtatattaatattttggtttgtttaaatgtgttatatatattttgtattatataaggaaaataatgattatagttttttaaagatagatattagaatttggtggagaaatggttgattcgaggtttggataggaaataagtaagtgatttggaatatgttaaattaaatattaaagaggttattaaagttattaggattattttaaaagaatttgagttattttgaagaagtttttgatggttagagatggaataaattgtatattaataagggtaaatattgtaatggagttgatttattgttttataaggatatttaaagaaatattaatttattattgttggataatattagtaatttaatttattatttgtaatttggtaagtaaagagtgagaaagaagtattttatgttatttaaaaaatattaaaaatgggatatttaggtaattaaatagtaaatgagaagtttttttttatagaaagtgttttagttaataaagaaagaaaagttgatgaaattagaatattattattttgaattatttaatgaattaatgatggattttggtatttgattattaatggttacgaacgttataaaagagggatataattaaatttttagtgtttttttatgaaagaatataaaattatttatgattgtcgtgtgaaaaaaaaaggattttgaattgtattaggttgtattataggtatgtaaatagtaaaatttagattgtgggtaatgtgataaaataaataatatatattagtgtataaaattttagtagggagaaaaagagatgttgattgagggagaattaatagattaaaatagatatgaaatatatattaattaattatatagtgtggattttatttagattttgattttaataggaatatttatgaggtaatcggaaattttagttttgaatgggtttaaatttgatagtttgattaaaattgttaaattaatttgataattgatttaaaaaatttttattaaatttttaaagtgtaataatgatattgtggtaatatttttttttttttgagatggaattttattttgtcgtttaggttggagtgtagtggtgcgagttcggtttattgtaatttttttttgttaggtttaagtaatttttttgttttagttttttaagtagttgggattataggggcgtgttattatgttcggttaattttttatatttttagtagaggtagggttttattatgttggttaggttggttttaaatttttgattttgtgatttatttatttcggttttttaaagtgttgggattataggcgtgagttattgcgtttggttgtggttatatttttttaagaattattatgttttagagatatatattaaaatgtttatagataaaattatatatttgagatgtgttttaaaataatatggggtgggggaagtgaatatagtaaaaatggagaaagattggttatttttttgtggttatttgggttggttaatggagttgattatttattttattttttttagtgaatatttaaagttttttaaaaaaaaaaaaaaaaaataaataaaaaaaaaattagaaataaaataaaattaaagaatataggtttttttttttttgtataatttgtttttaatgtttaattaatttaagtattttaagggaagaaatgtattagaattaattaaaaaattggtatatatgtagtatgagttatattaaatatttgtaaaagtagtttatttttttaatttaaaaatagtagtttattttttttgttttttttattttatttttttaaatatttatttatttatttaaaagttattaatatatttatttgtatttattagtattattgattattgaatggaaaattagtttatataataaagttgtatttatgtagttaagtttaattaagtttattattattttaatagaatagaaatatagtaatatataggtatgagatgtttgtttattaaagattaggtataaaaataaaattagagtttttttatttttggagtggataaggtagtttttaatttagtatataaaatattttttttatttaaatattttgtgttatttttattgattgatatttaaataatttttaattgtattatatatgttaaaaatgataaggttaatgttttaatattttagtttgttttttttatattttgtttttttattatttattgatagatattagttattaatttgttggttatgtttatgttaatggatttttaagagaaatataataaattgttaaaatataaattttgttaattaaaaggtagggtgatgatatattaaaatattgattttaaaatgttaatatatatatatatttacggttttagtttgatttttttatgatttaggaattttattattttttttttaagttttttatgatttattttttttgtttttgaggttttgaaaatgatttttattgttttatattttgcgatttatttgtttaaatttagaagtgaagggcgggaattaggattcgggtttcggatggaattagattatgtttttattatagagtttttaaattagggaggtttgtttgatatataattaaggaaaattgttttttaattaaggggtatttgtgtttttttgtgatttttttttgtagtaatatgaaaatatttatgaaatgtttatttttatattttgaagtgtatttttttgagtttttggtttatttttaattattgaaataattaaagaaagaataaataaatttaaataagtatatggaaaatatattttttttttttttttatttttttagtgtatagtttgtttttgtttatgatatttatattaagatttttttttttgtataaaattgataattaaaaggaaaatatttatttagaataagaagttgaaggtaaatatagaatattttatataggtatttatatttgttatttcggaaaaggattaggaatttagatgtcgtgaatttaattattcgttataggtttgttttgtaatatgttttggagtaatttgtttgtagagatttttgtatttacggttttagagtagaaagagaaagtaaagaagtagagggaggaataaaaagttattaaattggataaaaaaattaatttatatatttaaatatcgtaaaggttattaatttatatatttaaatattttaaaggttattaatttatatatttaaatatcgtaaaggttatttttaggtaagtatgtttttttgtttgttatagtttttggggtattgggttaggatatttatgatttttttttaaaaattgttttttttaaagtaaatagatattaagtgaagggaatggtattggattaggtaagagaatggtatagtgttattaagtttttggtttttagaaattattgtttgattttttcgttttttattttaattatggggaaataaggttgttttgttttgagttaaatggatattgtatttttatttatttttgtattgtatttttttaatattataaaattttttttaaatgtaataaaatgtatttagaaatttgtaaaatattaaagtttagatatagtaatttgttattattaaatttagaatagtaaaataattattatatgtatttgttttttaaaatatttaaatttattttaaaagaattttagagttgtcgtaaatatattatagaaattgtagagggagaggtagttttgtttattatgataagattatttgttttttatttttatttttttatgatataaagggaaagaaattataaagtggtattgattgtaatattgtttttattttataatgcgtagttattttgatagtttggtttgtttttaaggtggatattgtaattttttttttttgataaattgtatttagtaatagttgttttttattaatttagtttttggattttaggttttttcggataaaaaaatttaaaatgggaaggtggttatggattagtgattatagattttattatttgtttttagtgttaatagaaggtagttgttttaggtaaaggtaaaatgtttcgatattattagggaggtgtggattgttttgtgtaaatagtttgggttatgttagtttttatattttgttttttaaagggagtttttttttttttaaataaaagaattttttattttaaaaggttgttgagaaaattattttttagaatttttgttaagttttatacgataagtaagtatgaattttttataaaagaaaaatattatttttaatttttattggtatataatgtttttgaaataattttattttttgattataaatataatatattttaatgtattattaataataatatatagcgttaaaggttaaatttaggattaattttaaaaataatggtttaatatataaattattattaaaattgtttgtgtttttttttttattagaaaatggatagttttataattttttattgagatattttgtatatagaataatttaaggttgaaagaataattttagattgaatgaaaattaaaattgatttatagttttagaaatgattatttattagaggttaaaattaaaaaaaaattatagatttaaatgttgttttgttgaaaagaatgtattgaatattattaaattttagtttgaaatagatattttggtggatgttgaatatttttaaaaagaatattgtgtagtttttagttgaattatttttgaattttgtaatataaaaattaatggatgtgtttgtataggagaatgattgtgtaatagaatttttagtttaatttaaaatttatatgaaatagtttatttttggaaatttttatttttattaatgttataattatataatatttttttaggttgaatttgtatagatattttgtatttttttttttttttatttaattatttttattggtttgtgtagtttttaaattattgttaaaattattttttttattttatttttttgtattttattatttagttttttattattttttatttgagttgtgttaatagaatgagaattaatttttttggtagttttttttagtttttttttgttttagtattttaaaattttttttgagaaatatttattgattaggtaatgataatgatgaaaatttaatttaaggatattttttttttatttataagataaagtttagattttttaaagtagtatttatagtatatagtaaataagttttttatttattttttagaattttgttttttttttttttttttaggtagtttttatttttaggttttataattatagaattattttttaggtttagaatatatttttggattttatgttttgttttttttgtttggaatatttttttttattttttttattgtaatatttttgtggagtttttttttttttattttttgtttttattttgggtagatttatttgttttttagtttttaagtttattattatttgaatagattttaaatttataattgttattatattatatttatttgtgttttttttttatatttgattttatatgtttgaaaagtagaaattttattttatttatttttgtatttatagtagttggtattagagttatagagatttgtaatggtagttaagttttttagaaagtttaattagtgatttttttattaggttttttagggaattattaatatgttatttttgtttttaaaaaatttattaggttaagaaaaatagtttattaattttaggatttgttagagtttttaattttttaatatttaaggaggtgatatatagtaattttgaaatgaatataattttagaatatatttttgaatgatatatttaggattggtgttatagaatatatatacgtatttatagaagtattgttttagataaatttttatttttatatttgagaaaagagtagtataggtagattgagtagtttaagtttataaaattggttagatttttttttagaaataaggttataggattattagattagtattttgtttattggcgttaataattttttgagttttgtagtatgagaatgagttatttatttattatttatttaacgtgttttagatattgagaaatttttatataatagatattttaatagtggtgggaggttgtaggggttggagattgttagtaataaattttagattttgtgaaagatcgggttagtaaggaaagaaatggagagtgaaatattataagaagaaatgataatcgagggaaagaatagagggaaagtttaagtaaatttagataaagtttttttaatgttgttattatgttaattattatttattgtagtaaatgtatagagtaaggtaggataatgattttaatttgattaattgtgaaaagtttttatgaggtagttattagtgaattagattttgatagtagtatgggaatttatgtaggggaaagaaagagagagagagattttttatgtttagggtagaggaaagtgtatgagtagtattattaaatattttatagaaaatatggtattttttttaagttattaggtaaattaggtttacgtttgggatttggattagaaattaagtatagatagtttatatttttattatgatattatttttttttttataagataatatttaaaaatttatttaattgatgtattgaatttttattatattttaggaatgagattaagtgttggaaatatagtaatttatgaaataagataaaaatttttgtttttttaggttttatattatggtgaaaaggtaatttttttgtttttttgtttttaatatttcgttattcgatatatttgtttatggaatagatagtaaaaaagtaatttatgtgtggtagagaaaagattattttttttttttgttttttatatttttttattattattgtttttttatattatttgttttttatgacgttgttaataattaatttatgtttttaaaggttaatagtagtaataaaaatataatgttgagattttttttttttatgattgtattgaggggtgtgtatgtaaggatatgagattatatattttgaataatttgagtgaagagattttggtgtttttagtatgttttattttgaaaaattttttttatttttggaaagttggagtttttatttaggggttttatggttttttttataggagtagagttttggtttttgtgttttagttttattttagtttttttgagattaatattttttttttgtttttatgtgattttaatgttttgttttttattttttgtgtttatggagtttggtttataaaaattttttatgtatttttattggaaatgtattagataggaagtattcggtatgggaaagatgttttttttttttttgtaggatattttaaagtaattgtttttatttgagagtattaattttagtttagaattaaagtaggggttagaattgttattgtgaagtagtaatatagtgtttatagaaaatggatatttagtatttaatatttttttttttttatagatattttattttaaaatattaatgatttgtatttggatataaatttattatataggatatataaggaaaaatatggaaatgtgtatgaaagaaatagattttagtttattaaaatatgtgtgtataaggaaaattgaggtaaaatggtgtagtgattaaaaatgtagtttataattatggtagattagagatgttgtggatttttattaagttttattatggtatttatattttttttatagtaggttaagagattagttgttgggtgggaattagggttaggtttttggtttggtagttttgaagttttattttgttagtttttttaggggtgatttgttttttgggaaagatttattttaaaagtttttataggagttagaatgttaattttttattttattatgagaaatgtatttattagattatttatttagtataagatagtagttgattagaaaattttttttttgaaaaaaaaaaaaaaatagtatagaagttag

SEQ ID NO: 163 - DNA, 20486 bp, Artificial Sequence
  chemically treated genomic DNA (Homo sapiens)
tgtatagaggtaaatagtataaatgttattatgtatagaattaggtatgagggaggtatgtggaggataaagcgtgaggattaatagggttagattataagatatttgtattttatttgattttgtattagaaattgtattttgattgggcgtggtagttggtgtttgatatggtagcggttagatggaggttgtttagaaaaaaattatggattttttgtttagggatttagatgaaaggtttttttgttttagggtttttttaataaaaaaaagaaaagaaaaaatattttggttgtaatttatagttttttttttttcgttggaatgaagtggtgtttttttagtttattgtaatttttgttttttgggtttaagtaatttttttgtttgagttttttaagtggttgggattataggtatttattattatatttagttaatttttgtatttttattagaaatagggttttattatgttggttaggttggttttaaatttttgagtttaagggattttttcgttttggttttttaaagtgttgggattataggcgtgaattattgtgtttggtcgtaatttatagtggttttttttgtttttttttttaatttttttttttagagatagggttttgttttgttgtttaagttggagtgtatttgtatgattatagtttattgtagttttgaatttttggagttttttgtttttttgtgattattttatgttatttttgttttaattttttaatggaagggaattgtttaaggtgtataagatggaggttttaatatggtgtggtggttgagttttggttcgtgggtttaatagatttgtgtttaaagtttggttttgttattaattagttgtgtttttaggtaaattatattttaagttttagatttttaatttgtaaaatgagaataataataaataatattttttgttttattagtttattatgaggattgtttttttggtagagttatggtttcgttatgttgtttaggttgtttttaaatttttggttttaagtgatttgtttgtttcggttttttaaagtgttgggattgtaggcgtgaatttttgtgttagtttattataaggattaatgtttgtgaagtgttaaatatagcgtttggtatataataaaaatttaattaaggttgttagttatttttaagtataaattggggattaagaaggtaaaaatggagtgtgttttttgtagatggacggaggggagttaggatatagtttagtttgtttatgtttagagagttaagttgttgattttgaaggtagggggtatataattgtatgtgggagttagattaagtagtcgagatagggtagatagtgtgagaaagttgttgatgagagttgttgttgaataaaattattttttatttgtttatagttttttaagtgttttttttgtttatttatttattattttcggattttaatatgatttttggcgtagtttaaatttgatatttataatagttatagatttttttgttttttttatatttttatttttttgagatagggttttgttttgtcgtagaggttggagtgttttggtgtgattacgacgtattgtagttttgattttttagttttaaatgatttttttattttagttttttaagaagttgggatgttttataggtacgttttattatatttaggtaattttaaaattttttgtagagagggggtttttttatgttgtttagggtaagaatttttaaatttaaataggtttttttttgttaagattttagttcgtgggtgattttataggtgtttttattttttttttaagtggaataaattggtttttagtttaatttgtagagatagttttgttttggggaagttatttgatgtagaataaggataggagataggttaagttgtagttatttgattttcgtgattaagagagttttgaagtaaagagattttttatttggatttttgggtaggagatttataatttttttttttgatttaatggttgttttaggtaggaattagaattatttgttggaagtttgtattgatttatttgaatcgattattgttttttttttttttttattttaagttattatgtttttatggtattaagtagatttttttgaaaatttttagaaaattgtttgttatttgtaagaaattgttttttttttttttgtattttacgttattttaatgttttttttatgtagttttgtcgtttaagttatttttttgaggtaaaatttttttatttttttagtttttttttttttagattgagaaattttaggtttgttttggatttttgttttgtagtttttgggtttttttttttttttttttttttttattaggtattaagttcggagtttgcgtggttttgatgtttgttcgtggattattgattgattaggttgaagttagagggttttttagattcggaggataatagagtaggtagtatttttatttacgttttgagattttttataattgttttagtgttgtacgtatttatatggaaaatataagtgtattgttaggtttggggttaatggttttattttacgttttagaggagtagagttttagtgtatttgtggagtttgaattagttgtattttaagaggagtagagaagggaagtaattttttattttattttttttaattattggtatttataggtttgttatttatttttgtttttgttaaatggtatagagatgaaattttagaataaaatttttgaatttaataaattgttaattaatatttaggagtggtagatatataatgtttttttttttacgataggttaaagatgaaatttgattaggttttggagggcgtggtttgttttttgaaattttttgttcgtttttagaaagttgtgttgtttagagtatttaaaagtgttttttatttaattgagggaggcgtatttgtttttatatatagaggtaggagttggtattgggaaagttaaattagttttgtattatgaggaagaagtagttgaagacggaggtagttttatattgtgaattaagtaagtagtttagggaagttgtttagttgagtagatttgaaagggtgataagtatagttttagtaattttattttttagttataatagaagttgttaaaggaaaggtttcgatttggaggaattttattaaatttttttgaaattttatagatgtattgtagcgagaattttagaattaatttgtgtatttttttttttttttaggagaaattttgtatgaaaattaatttgttttaggaagttaagttttttttttttttttttttggttttcgagtttgtttttatttcgtattttatttggatttttttttttgtagtttacgtttttttttttattttttggttttttttattaatgaaatttttttttagttgtttttacgtgaataaagaagtttaattatttttaatgttgtaagtagtgcgaggggtcggggagtgagggtggcgggaggatttaatgtttttggtggttgtaaacgatattgtagaaaattacggtaatttgttaggttatttattttttttttattagtttggtagttttatttttagagtaaaagatacggtgtgaggttgaaattggcgatagagtgggattgtttttgggtaggtaggatgaagtttggggagaatcgagttagttgggcgaggaggaaaataatttattacggaggtttgggaggatatttaaggcggttaaattggttgtattagttgatgtttttcggttttttttaggtgtggggtgtttttggtggggtagtagatattatgatgtggttttgggggcgcgaggaaatgttttttttaggtggttattttttttttttgagatagggttttgttttgttatttaggttggagtgtagtggtacgattttgttttatcgtagtttttattttttaggtttaagtgatttttttattttagttttcgagtagttgggattataggcgggcgtcgtgatgtttggttaattttttttttttttagacggagttttcgtttttgtttttaaggttggagtgtaatggcgcgatttcggtttatcgtattttcgtttttcgggtttaagcgatttttttgttttagtttttcgagtagttgggattataggtatgcgttattacgttcggttaattttgtatttttagtaaagacggggtttttttatgttggttaggttggttttaaattttcgattttaggtgattcgttcgtttgggttttttaaagtgttgggagtataggcgtgagttatcgcgttcggtttttgtttggttaattttaaaattttttgtagagatcgggttttattatgttgtttaggttggtatcgaatttttggatttaagtgattttttcgtttcggttttttaaagtgttgggtattataagtgtgagttttcgcgtttggtttggttattttttataggatagagttatatttcgtagtttgattgttagtatttaacgtggcgttacggcgaattagggtaggaattttatttgtttttagattgttagcggattggagttttttagtttaggggttgtgtgggtttggttaacgtaagtagtaattaggtagtatgtagttttcgtcgggtgttttaggggtcgtcgcgtgttttaggggtcgtcgtatttagatttcgcgtgggcggagtttaggtttttggtttgcgggttacgtatttcggtcgttgtagggattttagttaatagggatgtgcggttgtcgttttgtcgattaatcgcggggaggggagggcgttatagtttggcgttggttttcggaatatggagttttgggcgcgggggcggcgtgttaggtggttgcggagttggtaaggtgaggggaaggtaaggttaggggttacggtatttcgttcgttggtagggaggggcgcggggcggttcgagggtttgtgtcgggggttaggtttcggggttaggatgcgatatcggttcgtcgtgcggggttgtgaggggaggtgtggttagggagggttttaggtttagagtttaggattgatggagtcgcgttatttagagaaagatttaaagatgggggtagggagggaacgtcggaggtcgcgggggtttcgtttttttttcgtcgcggtttaggatatatggtttagtttttagttgtatcggatggcgcgttcggtttgtgtcggggtgcgttgatttgtttcgacgtttcgaaagaggtcgacgggtatagggtaaggtttttcgtggttttttcgtcggcgtcgtagggggtcgggttgtttttcggggtttttcgtcgtttcgttttaataaaagatttattgtaatttaatcgattttagggagcgttttttgtgtgaatagtttgtatacgcggtttagtaattgtgggtagattggttttaaggttgtttgtgtagtttttagggattttttggattttaggttttaatgagtagggtttttttatagggggatattgtatatatgtaagtgggttggatggtttttttagttgtgcgttttatgtgtttttatttttaaagttatcgtttaaatgtgatattttttgtaaaagtaaaaattatatvgaaggagagtttgtaaggggagataggtttttaaaaatttgttggttttaattttagtgattgttggtgaaaaatggagaagttatgtttatattgatttttggaattcgaagttttattagttcgtatgattttttggttttgtaaatttttgagtatgttgtttgtttttttttttttttgttttacgtatttaaaatggggattgataatattagttttatagggttgttggtatgaaattagttaataaataataaagtatttagaatttttgatgtggaggagtttttgttgttgttattttttttttttttaatatttttaaagaattttaattttattatttattttttgtttagagttttatgatttattattagtgaattcgtcggtttatattttttattgatattattaattttgatttgagggtatagtgtagttatatgtgattagaggatttttgttgcgtgtttgttttattaaatacggttggaaattattattatattaggttatttattgtgatatttgtgttgggtaaatgaaatttgaaattttcggttgtttatttttttattggatagtattttattgatagttttgtttggtttatttagtttattttggagttagtattaaaaaggttatgattgtagtatatttggttttttatgttttcggaatggtagtgggattcgggaggggaatttttgggtagtttggtagtattttttgttaaggaatggggaagttttttatgaatttaattttattttaatgttaggaaattagtagtggttttttggattattttataaagttagtaggtagttttggtttagttatgatttagtgaaggttagagaattatatttataaagtaggatttttttttttttttttttcgttttttgatacggagtttcgtttttgttgtttaggttggaatgtaatagcgcgatttcggtttattgtaatttttgtttttcgggtttaagcgatttttttgttttagttttttgatgtttggcgaattttttttgtatttttagtagtgacggggttttattatgttggttaggttggtttggaatttttgattttaagtgatttatttgtatcggtttttcgaagtgttggggtggtgtgagttatcgcgttttgttagattttttttgtttgatttttattgttaagaatttgggtgagtgttgttgaattaaagatatttttattttttgtttttttattatgtatatacgtataaatgtttgttgatagatatttgttttttttatggttttaaaaagtttttttatattttcgtggtgttatttgggatatattagtggaagattgttttgttttttaatttttttttttaaagaagcggttatttatatatatagtattattaggaattagttagaaaatgagaaattttaagtttatgaaaaaaaatattgtttattttagttgtatgttggttaaatttagttgaagtgtagttggtataagtttagttgtttagttttggaataagagagtttaagatttttttttttattttttataagataaggtttggttttgtaatttaggttggagtgtagtggtatgattatagtttattgtagggttgattttttaggtttaagtgatttttttgttatagtttttttagtagttgggagtataagtgtatgttattatttttaatttttaaaaatttttttgtggagatggagttttattaggttgtttaggttgttttgagtttttgggtgttagttatcgtgtttaattagtttaatatttttttaggatttaaagttggaagttggtttggtaagagtgaaggataatgtttttgtaatttgtttttttttgagaggtatgggaatgatatttttaaagaattgagtgtgtttgaggtagaaagggaagttttgttgttttaatattgttattattattatttttttgaggttttgtagtttgagtaaaatattttgggaaaaaaggtaggggtatttgaatgagcggaatataatgaattagaagatgtagattatgttttatttattggttgttatttattttttatttttatatttttgagatagggtttcgtttttttgtttaggttggagtgtagtggtttagttttggtttattgtaatttttatattttaggtttaagcgatttttttattagagttttttgagttgttgggattataggtttgcgttattatgtttagttaatttttaatttttttgtagagttgagttttattatattgtttaggttggttttgaatttttaggtttaagtaatttttttgttttggttttttaaagtgttgggattataggtatgagttattgcgtttagttttgttatttattttttttataatttaataaatatttatggagtaatttatattaattggttttttgagatataaagaagagtttttaaggtattattaggaatattttagatataataaaatgatatgtatataataaggtatattttaatgaaattataatggaatataaaataattggttagtaatgattaaaatggtttaattttttttttatttttaattttaggttaaagtaatttatattttttggtataaggaataaattagggtttttagttttgttttggtgtttattgtcgataagttattttgtgttaggtttgtgtttgttttggttttatttttattaagttgatagttgttaaaatttttaggaaatgaaagaagaaagttataagttaattattaaaattttattaggtttcgaagagtagaaagaggtttgttaaaggttggagaattttgtagtatatattgttttaatttttttttgtttttaggaaaagaaatttggaggataatatttatttaaagttgttaaggttaatttatattatttgggagttaatatttattattaggaaaaatgggttgaatgtaatttaatgaaaattttttatatttgttagagaaaagttatttaagtgtgaggataaaatatattttttgaggtaagaagtaggtataggttggtttaataggggatttttttttttttttttggaaaaaagtaatttttttttttttttaatggagattgggttttttgttatgttgtttaggttgttttaagtttttgggtttacgtaattttttcgttttagttttttaaagtgttaagggattatagatgtgagttattatggttagtttaatagggaatttttttattttaatagaaaggggtttttgaaattgtttatagagtttggtattgtgttttatgatagaggtgttagattaggaggttaggtttgttttttaaaaggaaatatattgttgtaaatttttggttaggaggaagtttagaggaagtttatatagagttgggaagaataaagacgaagttatagttattggaagtaagattttagtgattttgatttgtgagtatttagggagatttggaagttggttaagttttaagagtgttgatgggagaaggtgaagagttgtatttaatgggtattagttttttttaattttgatgtttttggttgatgtgtgatatttttgtttaaaagataagtattttttgatagtttggttatattttttttaattgttatcgtttttgatatttaggtagttggttttattattagttgtattttttttttttatatttttttttttttttttttttttgttttttaatattttttttatttttttttttttttttttttttattttaagatggttttaatgttaggttttttatttaattataaaatatttaaaagtttagtttaggtgagaaatagtaaatttggtgttgagttgaagttgtggttgttttttttttttttttgagatagggttttattatgttatttaggttggagagtagtggtgtgattttagtttatcgtaatttttgttttttaggtttaagcgatttttttgttttagttttttaagtagttgggattataggtacgtgttattattgtttggttaattattgtatttttagtagagatggggttttgttatgttggtaaggttggttttgaatttttgattttaaatgatttatttgtttttgttttttaaagtgttggtattatgggtgtgagttatcgcgtttggttcgaaattgtggttttgtaagttaaataggatgtttttaattttgagattattattagggtatgtaaagtatggtttggtatttgtaggggattggttttaggattttatttatatgtatattaaaattttgggatgatgtttaagtttttataaaatggtgtagtatttgtatttaatttatgtatatcgttttatgtatttaaaattatttttagattagttatattaattataattttttttttttttttttagatagggtttcgttttgttatttagtttggagcgtagtggtgtaattatggttcgttgtagttttgattttttgggtttaagggatttttttattttagttttttgagtagttgggattataggagtgtggttattatatatggttaatttttaaattttttgtagagataatgttttattatgtcgtttaggttggttttaaatttttgggttgttttagttttttaaagtgttgggattataggtgtgagtaattgtattgggtttataatatttaatataatgtaattgttatgtaaataattgttttgtattgtttagggaataatattaagaaaaaaatggtgtatatgtttagtataggtataagtaatcgtttttttttttaaatttttttgatttgtagttgtttgaaattataaatgtggaatttagggttatagaggtttgattgtattttagtggttattatgttagagagagagagagagattggtttatgttaagcgtattgtataatagtagttttgtttgtattttataaattgagtgtgtttgtgtggtttttggttgaagatattttaatattatttatttgagtagaggggattagagttttgaggtttttttttaaaatgaatatttattataggggttttttattgtttattatgaagtatatataattagtttttaatttgattttttttttttgtgtattattttatattaaatttattttaataagaggaaaataggataaatttattttagtgtaaaaaataatattttatttgagtttaggagtttgagattagtttgagtaatatagtaagattttatttttataaaaaaaaaaaaagttagttgtggtggtacgtgtttgtagttttagttatttgggaatttgggaggttgaggtgggaggattatttgagtttgggattgtgtaattgtattgtagtttgggaggttagaaatatgtaaataattgttttgtaagattttgttttaaaaaataaaataaaaaataatattagattttatatttttaagaataatttggaaatttatatgtttattttaagttgtttttttttttatatttcgaatgggagtagattgagttttagaattaattgggttgggtatggtagtttatatttgtaattttagtattttggaaggttgaggtggatggattttttgattttaggagtttaagattagtttgggtaatatggtgaaattatgtttttataataaatataaaaattggtagggtatggtatacgtttttagttttagttatttgggaggttgaggcgggaggattatttgagtttaggaggttgaagttatagtgagttgagattacgttattgtattttagtttgggtgatagagtaagatattattttaaaaaaaaaaaaaaaaaaaaagttggatggatatttttgatagatttagaaaatgttgtttttttatgatttagaatggaaaaatagagggagagtaataattttttattttaaaaaagtgattaataattttttttattaaaatatatagggtttagaaaataattagttttgtttgagttgttagaatattttagaaagttttgttgattgttagttatttaaatggtaggagtttatttttatgaagagtatttggtataataaggtgttgtgttaataatatagtaatggtttagtagaattgttaagtattttggttttgaagtagattattagggaaaagagaattttagaagaatttagaaatttttttattttttttaggataaatataatttttttaaaaaatgagaattttttgttattttttaataaatattttgggtgtcgttaagttttgatttgtgtatttagtagttttttttttgttattagtatgtttttggtattgaatagtgtttgaggaagaatgaattgaatagtgttaagaggaagaggtggttttgttatgtagtttgaacgtatttttgttagtatttattttattagttatttttatgaagatatttttttggttgtttttatgaaagtttttttttatttaatgttgtttttgattttattgagatgaggaaggtgatgaaaaaaaaggaggaaagaattaagggattgtatttaaaaatatttttttttaaatttataattaattttagggagatttttttagttgtaagattagtgaaatggttttgagtatttttattttttataggggaattttatatgaaaacgaattattttaaatttaaattatttatttatttatttatttgtttatgatagatagggttttgttttgtagtttaggttggggtgttttgattatggtttattgtagttataattttttaggtttaagtagtttgtttattttagttttttaagtagtacgtattattatatttagttaatttttgtatattttttgtagggatggggttttgttttgttgtttaggttggtattgaattttgttcgtttcggttttttaaaatgttaggattataggtttgagttatcgtattcggtttaaatttttgttttaatcgtagattaaaaaaaaaaaagttgaagttgtatatattaatatttagtattttaaatttttttaggggtagttttttgttttgtgttttttgttttttttttgagatggggttttgtttggttgtttaggttggagtgtagtggtatgatttcggtttattgtaatttttattttttaggtttaagcgttttttttgttttagttttttaatagttgggattataggtatttataattacgtttggttaatttttgtatttttagtagagacggggttttgttatgttggttaggttggtttcgattttttgattttaagtgatttatttattttggttttttaaagtgttgggattataggtgtgaattattttatttagttaggggtagtttttaaaataggtttgggttatttaaattgtttttttagagtttttataaatgttaagagaatatatagaattattgttaattagatgttagaatttattatagttagtatgtgttttggggggtaatttaatttttatataattttaaatttgtagaaaagttgtaagagtagtattagggaatggataatttttaagaaaatgatagtggtaagtagtgggtgttttgagggaatacggagaagttatttaagttaaattagggagttaggaatgtttttttgagaggggatttttaatattttatatttaggtggtattaagataaattagtagtaagttaggttgaaggtaataaatatttgttaattagatagttgtagatttttgattatttattgtagaagttttattagagagtttaattgaatatttttaaaatgtttgttgagaagttgagtgaatttatatgattttgatattttttataaggtaaataatatatgtatttggtaaaatttttttttatgtgaaaaaggtatatagtgtatatttagtgagaggttttttttttatatgattttatttgggtttttttatttttttttttttttagggatggtttttattattagtttttggtgtgttttttggagattgtacgtgtacgtgtgtgtttttttttttttttttttgttatatatatgatagtatgttgtttaataaattggttttttgatttgataatatgtaatattttagagattgtattttatttatatatgatagatcgttttatttatagtggttgtatggtattttgtttaatgaatgtgtatagtttatttaattagttttttattaatattaaggttgtttatagtttttttatattataaataatgttgtgggaaatatttttgtatatatttttttgatgagtattttttgttttttttttttaaagaatatatttttaggagtaaaattgttagattaaagaatatgtagatttttgaaattttagatagaaaataaaattttgttagtatttttattttgtaaaatagttttataatattttttttttgagatagggttttgttttgttatttaggttggaatgtagtggtttgattagtatttattgtagttttgattttttagatttaggtgatttttttattttagtttttcgggattatagacgtttattattatatttaattaatttttttttttttttttttttttgagatagagttttgtttttgttatttaggttggagtgtagtggcgcgatttcggtttattgtaattttcgttttttaggtttaagtaatttttttgttttagtttttttagtagttgggattataggtgtttattattatattcggttaatttttttttttttttttgagatggagtttttttttgttatttaggttggagtgtaatggtgcgattttaatttattgtaatttttgttttttaggttttagtgaattttttgttttagttttttgagtagttgggattataggtatgcgttattatattggttaattttttgtatttttagtaaagatggggttttattatgttggttaggttggttttaagttttcgattttacgatttgttcgttttagttttttaaagtgttgggattataggcgtgagtattgtattyagttttaatttttgtattattagtagagatggggttttattatattggttaggttggtttcgaatttttgattttaggtgatttatttgttttagttttcgaaagtgttgggattataggtgtgagttatcgtgttcggtttttatttagttaatttttgtatattttgtagagatggggtttttttatgttgtttaggttggttttgaatttttgggtttaagtaatttgtttgttttggtttttcgaagtgttaggattataggtatgagttattatagttagttagttttataatttttgttagagaatgggataaaataggttgggtatggtaggtttacgtttgtaattttagtattttggggaggttgaggtgggtagattataaggttaggagatcgagattattttggttaatacggtgaaatttcgtttttattaaaatataaaaattagtcgggtatggttgtatgcgtttgtaattttagttattagggaggttgaggtaggagaatgggataatatagttatattatatttaattatgagtgttattttttttttgttaattgttgttcgataggaagaaatttaatgggtttaagagaaggtgatattttatggttaggggtaagttggaatattaaagtaatgttaattataattgtgatggttatttattaaagtattgttgggttgattttagttgtttgtgttttaattttggattttttttttaatgtgacgaagtaattgaaataatttggtgttatagttttggagagtaaaattgttttaatattaatttattgtttttatatgggttataaatttttatggagatttgaatgttgtgtataattggtttggttttttttatttttttttagttttttttttttttaattatttaattatttattttttataagatggagttttgttttgttgtttaggttggagtgtagtggcgtaattttagttaattgtaatttttattttttaggtttaagcgattttttcgttttagttttttgagtagttgggattataggtatgtattatgatgtttggttaattttgtatttttagtagaggcggggtttttttatgttggttaggtttgttttgaattttcgattttaggtgattcgtttgttttagttttttaaagtgttgggattataggtgtgagttattgcgttcggtttttttttagttttattaattttttttttttaatgagacggagttttgttttgttgtttaggttggagtgtagtggtgtaatattggtttatcgtaatttttatttttcgggtttaagcgattttttcgttttagcgtttcgagtagttgggattataggtatgcgttattacgttggttaatttttgttatttttagtagagatggggttttattatgttggttaggttggtttcgaatttttgattttaggtgatttgtttgttttagtttttcgaagtgatgagattataggcgtgagttattacgtttgattttttttattttattttattttattttgagatagagttttattttgtcgtttaggttggagtttagtggtatgatttcggtttattgtaatttttattttttgggtttaaacgatttttttgtttttgttattttagtagttggaattataggtatttattattacgtttggttaatgtttgtatttttagtagagacggggttttatttatgttggttaggttggtattgaatttttgattttaggtgattcgtttattttagttttttaaagtggtgggattagagacgtgagttatcgttttcggttttaagttttattttgtaggtattgtaatgaaatatgtagtttgttgattaaaagttttgttgaaaaggttggagattggaatttagaatttgtttttttttttgaaataatttatttttgagattttagatagaagacgaaattttttgtatttgaacggttttgtatgtatttggtataggaatgaatttagaatattattaataattatttaaaattttattatgaaatatttttgtttaaaaatatttgtagattatagttttgggaagattacgttattattttaattgtttgtttttaaaatataatttaaaagtttattttggtgtttgtttcggtagtacgtatattaaattggaataattaagagaagattagtatggtttttttgtataaggatgatacgtaaatttgtgaagtgttttatattaaaagaaaaatttttgtttaggggtagtggtttatgtttgtaattttagtattttgggaggtcgtggtgggtggattatttgaggttaggagttttagattagtttggttaatatggtaaaattttatttttattaaaaatagaaaaattagttgggtgtggtggtacgtgtttgtaattttagttattcgggaggttgaggtaggagaatcgtttgaattcgggaggcggaggttgtagtgagttaagatcgtattattatattttagtttgagtgacggagtgagattttattttaaaaaaaaataaaaatttttaaggtttgttttgtttattttggataaaaattttttttagatgtagacgagatatttttgtgttttttttttttttttttttagataaggtttcgttgtgttatttaggttggagtgtagtggtgcgattatggtttatcgtagttttgattttagggtttaagtagtttttttagtttagttttttaagtagttggtattatagatatgtattattacgtttaggtgattttttagtgttttaaatagtgtttagttgattttttagtgttttaatgatattaattattattataaaagtgatttatagtttggttaatatgatgaaattttgtttgtattgaaaaaaaaaaatataaaaattagtcgggttcggtggtgggcgtttgtaattttagttatttcggaggttgaggtaggagaattatttgaatttaggaagtagaggttgtagcgagttgagattatgttattgtattttagtttaggtgataagagtgaaattttgttttaaaaaaaaaaaaaaagtaatttaatttatttagtttattttgattagggttataattggaaatttgagttattatatttgtagtaatatttttagaattgattgacgtataaggaaggattgtttgttttatattaaatagtttaagattaattgatgtatttgagttttttgattttttagtgtgttaagtttttttttttttggaagagttatgtatagttttagatttgatttgtggtttttaatttattgtgggttaagataatttgataatattagtttgttataattatatgtaaaataaaagtaaaaaggttttgtcgggaacgtcggggttgtgttgtgattggaatttaagtgagttttgttattttgagtggttaaatatttaaattttatttaggtgaggtgttattgttattgattgaaagaggggttgaatttagttagtattattgggggttgttggttgatgtttagttatttggtggtttaaaatttgataggagatatatggttagttgttcgttgtaatataatatttggtattggtgattttagagaggaaggattatgttttttaaattagtaggtggtggtatatatgttttagaagatagatgaaatttaaaaagaaaagaaaagtttttttttggtttgaattttgtaattttataagtatagaatatgttggtagatagaaagattatttaaaatttgaaatagtaagttgaagattgtttatgtaggaataatatataagggataagggtggaaaaaagattagatttaagtagtaaaagattattaagcgaggttttattatttttttagtaggatagttattattgggatttaaagaggggtttattaatgaatattatgttgtttttttttttttaaatttgaaattaattgagaagtagataagaagattgaaatattttttttttaatagttttattggtaaggtttaatggagaatatgttatagatttgtttttaagtgagtttgttaaaatttttttttttaattaaatttaataggatgatggatatttggaatttttattttatttttgattttattcgttttattgcgggttgtttagtataggatttgtagataaaggttggtattttatacgttatgtttaattttgttggtgttttagtttttttggagagtttgggaggggttgggttacgggtgattagttttttttagttgttagagggttgaggaatgaggtttagaatattatggttgtagattttatttttttaggaagatttgaggttgttaaatagtggttttttattattagtatgtttgtatggtgtttttttttattttttttagaagattgaattatgagtttaaattatatattttagattaaagagaattatagatttttgtttttaaaaatttataaaataggttgggtgtggtggtttatgtttgtaattttagtattttgggaagtggggtgggcggattatgaggttaggattttgagattagcgtggttaatatggttaaatcgtgtttttattaaaaatataaaaattagttaggtatggtggtatacgtttgtaattttagttattttggaggttgaggtaggggaatcgtttgaatttaggaggtagaggttgtagcgagttgagattgtgttattgtattttagtttggataatagagtgagatttcgtttaaaaaaattaaaaaaaaaaaaaaaaaaaaataatttataaaatagggggaaatgtgtttggttttagatatttgggataatttggaggtaaaggtagagaatggatatttgtttagtagtttttgtgtagatgtttattaaaaaagtatttttttggttaggtgcgttggtttatgtttataattttagtattatgggaggttgaggcgggcggattacgaggttagtagatcgcgattattttggttaatacgttgaaatttttttttattaaaatataaattatttggttgggcgtggtggggggtatttgtaattttagttattcgggaggttgaggtaggagaattatttgaatttaggaggtagaggttgtagtgagttgagattgtattattgtattttagtttgggcgatagagtaagatttcgatttaaagatttaaaaggggggggaatggtatttgttgttttattagaaatatcgtttgtttaattgtttattattttttgttattcgtgaagggttttatagtgaaagttagaaagtttgttagatatattttaaaagagttgtaatattttaatttggttttgaagttttgttagtaaaattttgattaagatttttttttttttgttaaatatttgttagttatattttgaaaattgtaattatttttaagattatttaatttagtagaaaaattattttttttatagtaaggatttagttatatagagtaataaattgttggttttgaatttgttagtttgttttttttaattttttttttttatttttttttttttta

SEQ ID NO: 164 - DNA, 20486 bp, Artificial Sequence
  chemically treated genomic DNA (Homo sapiens)
tggaaaggagaaaagtgagggagaagaattaggaagaataaattaataagtttagaattagtagtttgttattttgtatgattgaatttttattatgaaaagagtaatttttttattgaattaggtaattttgaaaataattatagtttttagaatatgattgatagatatttaataaaaaaagaaaagttttagttaagattttgttggtaagattttaaaattaaattgaagtgttatagtttttttagaatgtgtttagtaggttttttggtttttattgtgaaattttttacggatggtagggggtggtggataattgaataggcggtatttttagtgagatagtaaatattattttttttttttttgagtttttgagtcggagttttgttttgtcgtttaggttggagtgtagtggtgtaattttagtttattgtaatttttgttttttgggtttaagtgatttttttgttttagtttttcgagtagttgggattataggtgttttttattacgtttagttaaataatttgtattttagtagagaaaggttttagcgtgttagttaggatggtcgcgatttgttgatttcgtgattcgttcgttttagttttttatagtgttgggattataggtatgagttaacgtatttggttaggaaaatatttttttaataagtatttatatagaggttgttaggtaagtatttattttttgtttttgtttttaaattattttaagtgtttaaagttagatatatttttttttattttatgagttgtttttttttttttttttttttagtttttttagacggagttttattttgttgtttaggttggagtgtagtggtataattttagttcgttgtaatttttgttttttgggtttaagcgatttttttgttttagtttttagaatagttgagattataggcgtgtgttattatgtttggttaatttttgtatttttagtagagatacggtttgattatgttggttacgttggttttaaagttttgattttatgattcgtttattttattttttaaagtgttgggattataggtatgagttattatatttagtttattttatgagtttttaaggatagaaatttgtaattttttttggtttaaaatatgtaatttaagtttatggtttaattttttagaaagggtaggaaaaagtattatataagtatattggtagtggaaggttattatttggtagttttaaatttttttaagaaagtaaagtttgtagttataatgttttagattttattttttaattttttgataattagaagaaattagttattcgtggtttagttttttttaagttttttaagagagttgaagtattagtaggattaagtatagcgtgtgggatgttagtttttgtttataggttttgtattaagtaattcgtagtggggcgggtggagttaggggtggggtggaagttttagatgtttattattttgttaagtttaattgggagggaggattttagtaagtttatttgggaatagatttatggtatattttttattgagttttattaataaggttattaaaaaaaaaatgttttaatttttttatttattttttagttgattttaaatttagaaggggaaggataatatagtatttattgataagtttttttttgaattttaataataattgttttattgaagaagtgatgaagtttcgtttaatgattttttattgtttaaatttagttttttttttatttttgttttttatatgttgtttttatatgaataatttttaatttgttgttttaggttttgggtaatttttttatttattaatatattttgtatttatagaattatagaatttagattagaaaggagttttttttttttttttaggttttatttgttttttggggtatatatattattatttgttaatttggaaaatataattttttttttttagagttattaatgttaagtattatattataacggataattagttatgtgttttttgttaggttttaagttattagatgattaaatattagttaatagtttttaataatattgattaaatttaattttttttttagttaatgataatagtattttatttaaatgggatttaaatatttgattatttagagtagtaggatttatttggattttaattatagtatagtttcgacgttttcggtaaagtttttttatttttgttttatatataattgtaataaattaatgttattagattgttttaatttataataaattggaaattataaattagatttggaattatgtatagtttttttaggaaaagaggaatttggtatattgaggaattaaaaaatttaagtatattaattagttttgggttatttgatatgaggtaaatagtttttttttatgcgttaattagttttgagaatattattgtaagtataataatttaagtttttaattgtggttttgattaaaatgagttgaatgaattaaattgttttttttttttttttgagatagagttttatttttgttatttaggttggagtgtaatggtatgattttagttcgttataatttttgttttttaggtttaagtgatttttttgttttagttttcgaagtagttaggattataggcgtttattatcgagttcggttaatttttgtattttttttttttagtatagatagggttttattatgttggttaggttgtaaattatttttgtaatgatgattaatattattaaggtattggaaaattagttgggtattgtttaaggtattggaaaattatttgggcgtggtagtgtatgtttgtggtgttagttatttgggagattgaattaggagaattgtttgagttttggggttaaggttgcggtgagttatgatcgtattattgtattttagtttgggtgatatagcgaggttttgtttaaaaaagaagaaaaagaagatatagaaatgtttcgtttatatttgaggaagatttttatttagaataggtaaaataggttttaaaagtttttatttttttttgagatggagttttatttcgttatttaggttggagtgtagtggtgcgattttggtttattgtaattttcgtttttcgggtttaagcgatttttttattttagtttttcgagtagttgggattataggtacgtgttattatatttagttaatttttttatttttagtagagatggggttttgttatgttggttaggttggtttgaaatttttgattttaggtgatttatttattacggttttttaaagtgttgggattataggtatgagttattgtttttggataaaaattttttttttaatatggaatattttataaatttgcgtgttatttttgtgtagagaggttatgttaatttttttttgattgttttaatttagtatacgtgttgtcgaagtaagtattaaaataggtttttaagttatattttaaaagtaaataattaaggtaatagcgtgatttttttaggattgtagtttgtaaatatttttagatagaaatattttatgataaaattttaaataattattagtgatattttaagtttatttttatattaagtatatatagagtcgtttaaatataaaaagtttcgttttttatttgaaattttaagaatgaattattttaagaaagaaaataaattttagattttagtttttagtttttttaataaagtttttagttaataaattatatgttttattatagtgtttatagaataaaatttggggtcggaggcggtggtttacgtttttaattttattattttgggaggttgaagtgggcggattatttgaggttagaaatttaatattagtttggttaatatgggtgaaatttcgtttttattaaaaatataaatattagttaggcgtggtggtaggtgtttgtaattttaattattagggtggtagaagtaggagaatcgtttgaatttaggaggtagaggttgtagtgagtcgagattatgttattgaattttagtttgggcgatagagtaaaattttgttttaaaataaaataaaataaaataaaagaggttaggcgtggtggtttacgtttgtaattttattatttcgggaggttgaggtaggtagattatttgaggttaggagttcgagattagtttggttaatatggtgaaattttatttttattaaaaataataaaagttagttagcgtggtggcgtatgtttgtaattttagttattcggaacgttaaagcgggagaatcgtttgaattcgggaggtggaggttgcggtgagttaatattgtattattgtattttagtttgggtaatagagtaagatttcgttttattaaaaaaaaaaaattaataaaattagggaggggtcgggcgtagtggtttatatttgtaattttagtattttgggaggttgaggtaggcggattatttgaggtcgggagtttaagataagtttgattaatatggagaaatttcgtttttattaaaaatataaaattagttaggtattatggtgtatgtttgtaattttagttatttaggaggttgaggcgggagaatcgtttaaatttgggaggtggaggttgtagttagttgagattgcgttattgtattttagtttgggtaatagagtaagattttattttataaaaaataaataattaaatagttaaaaaaaaaaaaaattagggaggaatagaaagggttaggttagttatgtatagtatttaagtttttatgaaaatttatgatttatatggaagtagtaagttaatattaagatagttttgttttttagggttgtagtattaggttgttttagttatttcgttatattaaggaaaagatttagagttaggatataaataattagaattaatttagtaatattttgataagtaattattataattatgattaatattgttttgatattttagtttatttttaattataaagtgttatttttttttaaatttattaagtttttttttatcgaatagtaattgatagaaaaaaaatggtatttatggttaaatgtaatatgattatgttattttatttttttgttttagtttttttagtagttgggattataggcgtatgtagttatgttcggttaatttttgtattttagtaaagacggggttttatcgtgttggttaggatggtttcgattttttgattttgtgatttgtttattttagtttttttaaagtgttgggattataggcgtgagtttattatgtttagtttattttattttattttttaataaaagttgtaaaattggttggttgtagtggtttatgtttgtaattttaatatttcgggaggttaaggtaggtagattgtttaagtttaggagtttaagattagtttgggtaatatagagaaattttatttttataaaatatataaaaattagttaggtggaggtcggatacggtggtttatatttgtaattttagtattttcggaggttgaggtaggtagattatttgaggttaggagttcgagattagtttggttaatatggtgaaattttatttttattaataatataaaaattaaagttrggtgtagtgtttacgtttgtaattttagtattttgggaggttgaggcgggtagatcgtgaggtcgagagtttgagattagtttggttaatatggtgagattttatttttattaaagatataaaaaattagttagtgtagtggcgtatgtttgtaattttagttatttaggaggttgaggtaggagatttattggaatttgagaggtagaggttgtagtgggttgagatcgtattattgtattttagtttgggtggtagggggagattttattttaaaaaaaaaaaaaaaagttagtcgggtgtggtggtgaatatttgtaattttagttattggggaggttgaggtaggagaattgtttgaatttgggaggcggaggttgtaataagtcgagatcgcgttattgtattttagtttgggtgataagagtaaaattttgttttaaaaaaaaaaaaaaaaaaaaaaattagttgggtgtggtggtgggcgtttgtagtttcgggaggttaaggtgggaggattatttgagtttgggaggttaaggttgtagtgagtgttgattaggttattgtattttagtttgggtgataaagtaagattttgttttaaaaaaaaagtgttgtaagattgttttataagataaaaatgttaataaaattttattttttgtttaaaattttaaaagtttatatattttttgatttagtaattttatttttaaaaatgtattttttaaaaaaaaaaagtaaaaagtatttattaaggaaatatgtataaggatattttttatagtattgtttgtagtatgaaaagattgtaaataattttgatattagtagaggattggttgaataaattgtgtatatttattggatagaatattatgtaattattataaataagacgatttattatgtatagataggatataatttttaaaatattatatgttgttaagttaaaagattaatttgttgagtagtatgttattatgtatgtagtaaaaagaaaaaagagaaaatatatacgtatacgtataatttttaaaggatatattaaaaattggtaataaaggttatttttgagagaaggaaggagtaggagagtttaaatgaggttatgtgaagggaaaattttttattgaatatatattgtatattttttttatataaaaagaagttttattagatatatgtattatttgttttataaaaaatgttaaggttatatagatttatttagttttttaataaatattttagggatgtttagttgaattttttgataaagtttttgtaatagataattagaagtttatagttgtttaattggtaggtatttattgtttttagtttaatttattattagtttgttttagtgttatttaaatgtaaaatattaaaaatttttttttaggaaagtatttttgattttttaatttggtttaagtggttttttcgtgtttttttaaggtatttattgtttattattgttatttttttgaaaattgtttattttttggtattatttttataatttttttgtaagtttgaaattatatgaaaattaagttattttttaaaatatatattagttataataaattttaatatttaattaatagtaattttgtatatttttttagtatttataagaattttggaagaataatttggatagtttaaatttgttttaaaaattgtttttggttgggtggggtggtttatatttgtaattttagtattttgggaagttaaggtgggtggattatttgaggttaggaggtcgagattagtttggttaatatgataaaatttcgtttttattaaaaatataaaaattagttaggcgtggttgtgggtgtttgtaattttagttattgggaggttgaggtaggagaaacgtttgaatttgggaagtggaggttgtagtgagtcgagattatgttattgtattttagtttgggtaattaagtaagattttattttaaaaaaaaaataaaaaatataaaatagaaaattgtttttaagaaagtttgaaatattgagtattaatatatataattttaatttttttttttttaatttacggttaaaataaaagtttgggtcgagtgcggtggtttaagtttgtaattttagtattttggaaggtcgaggcgagtagagtttaatgttagtttgggtaatagggtaaaattttatttttataaaaaatatataaaaattagttgggtgtggtagtgcgtgttatttgggagattgaggtgggtagattgtttgagtttgggaggttgtggttgtagtgagttatgattagggtattttagtttgggttatagagtaagattttgtttgttataaataaataaataaataaataaatagtttgggtttgaaataattcgtttttatataaaatttttttatagagaataaaggtatttaaaattattttattagttttatagttgaaaaggtttttttaaaattaattgtaggtttagagaggaatgtttttaaatatagttttttaattttttttttttttttttttattattttttttattttaataaaattaaagataatattaaataggaaaaaatttttatagaagtagttagaaaggtgtttttatggaagtaattgatgaaataaatgttagtaagaatgcgtttaagttatatggtaaagttattttttttttttgatattgtttagtttatttttttttaggtattgtttagtgttagagatatgttagtgataaaagagaaattgttaggtgtatagattaaggtttagcgatatttaaagtgtttattagagaataataaagaatttttattttttaaaaaaattatatttgttttaaagaaaatgaaaaggtttttagatttttttaaaatttttttttttttaatggtttattttaaggttaaagtatttgatagttttattaaattattattgtattattaatataatattttgttgtattaggtgttttttatgaaggtgggtttttgttatttggatgattgatagttaataaaattttttgaaatattttagtagtttaaatagagttaattattttttgaattttatgtattttaatgaggaaggttattaattatttttttaaaataagagattattattttttttttatttttttattttaggttatgaagaagtagtattttttgagtttattaaaaatatttatttaattttttttttttttttttttttgagatagtgttttgttttgttatttaggttggagtgtagtggcgtggttttagtttattgtagttttaattttttgggtttaagtgattttttcgttttagttttttaagtagttgggattagaggcgtgtgttatgttttgttaatttttgtatttgttgtagagatatggttttattatgttgtttaggttggttttgaatttttggggttaaaggatttatttattttagttttttaaagtgttgggattataggtatgagttattatgtttagtttaattagttttaaaatttaatttgtttttattcgaggtgtggggaaagaaatagtttagaatagatatgtgaatttttaaattgtttttgaaggtataaagtttggtattgttttttattttattttttgagatagggttttatagaataattatttatatatttttagttttttaggttatagtgtagttgtataattttaggtttaagtgatttttttattttagttttttaagtttttaagtagttgagattataggtacgtattattatagttggttttttttttttttgtaaaggtggggttttgttatgttatttaggttggttttaaatttttgggtttaagtgaggtattattttttatattggagtaagtttattttgttttttttttattaaaatgaatttgatataaaatgatatatagaaaaaaaaagttaggttgaagattgattatgtgtattttatggtaaatagtgaaaagtttttgtggtaagtatttattttagaaaaaggttttaaaattttaattttttttatttaagtgggtaatattagaatgtttttaattaaaagttatataaatatatttagtttataaagtataaatagagttgttattatataatgcgtttaatatgaattagtttttttttttttttttggtataatggttattgagatatagttaggtttttgtaattttgggttttatatttgtggttttaaataattgtagattaaaaagatttgggggaaaaaacggttgtttgtgtttgtattgaatatatatattattttttttttggtattattttttaaataatatagaataattatttatatagtaattatattgtattaagtattatagatttagtgtagttgtttatatttgtaattttagtattttgggaggttgaggtagtttagaaatttgagattagtttgggcgatatagtgagatattgtttttataaaaaatttaagaattagttatgtgtgatggttatatttttgtagttttaattatttaggaggttaaggtgggaggattttttgagtttaggaagttaaagttgtagcgaattatgattgtattattacgttttaggttggatgataaagcgagattttgtttagaagaaaaagagggggattataattgatataattaatttagaggtgattttaagtatatgggacgatgtatataagttaaatgtaaatattatattattttatagggatttaagtattattttaggattttggtatgtatgtgagtgaggttttggaattaattttttatagatattaaattatattttgtatgttttagtaataattttaaaattggagatattttatttaatttataaaattataatttcgggttaggcgcggtggtttatatttataatgttagtattttgggaggtagaggtaggtggattatttgaggttaggagtttaagattagttttgttaatatggtaaaattttatttttattaaaaatataataattagttaggtagtagtggtacgtgtttgtaattttagttatttgggaggttgaggtaggagaatcgtttgagtttgggaggtagaggttgcggtgagttgagattatattattgttttttagtttgggtgatatagtgagattttgttttaaaaaaaaaaaaaagataattataattttaatttaatattaagtttgttgttttttatttgagttggatttttaagtgttttgtagttgaatgaaaaatttgatattgagattattttaagataaagaaaaaagaaaaagagaaagtggagaaaatgttaggaagtaagaagaggaggggggaggaagatgtaaggaggaagagtatagttgataatgaaattagttgtttgggtgttaaaaacgataatagttgggagaaatgtggttaggttgttaaggagtatttattttttaaataaaaatattatatattaattagagatattagaattagaaggggttggtatttattaaatataattttttatttttttttattagtatttttgaggtttaattagtttttaaatttttttgaatgtttataagttagggttattaaagttttatttttagtgattatagtttcgtttttgttttttttaattttgtgtgagttttttttaaatttttttttaattagaagtttatagtagtgtgtttttttttgggggataaatttggttttttgatttgatatttttattatggaatataatgttaagttttgtgaataattttaaagatttttttttattggaataagaaaattttttattagattggttatggtggtttatatttgtaattttttagtattttgggaggttgaggcgggaggattgcgtgagtttaaaagtttgagatagtttgggtaatatagtaagaaatttagtttttattaaaaaaaaaaaaaaattatttttttttaaaaaaaaaaaaaaaaattttttattaaattagtttatatttattttttgttttagaaaatatgttttgtttttatatttaagtagtttttttttggtaaatatgaagaatttttattagattatatttaatttattttttttaatgatggatattggtttttaaatgatgtagattgattttaataattttaagtaaatattgttttttaagtttttttttttaaaagtaaagaaaaattaagataatatatattataagattttttagtttttaataagtttttttttgtttttcgaaatttggtaaagttttaataattaatttgtagttttttttttttattttttaggagttttaatagttattagtttagtagagatgagattaaaataaatataaatttgatataaaatgatttatcggtaataagtattaaaataagattaaaaattttaatttgttttttatgttaaaaaatataaattattttaatttgaaattaaaagtggaagagaagttaggttattttgattattgttggttaattgttttatattttattatgattttattaaaatatattttattatatatatgttattttattgtatttagaatatttttgatgatgttttgaaggtttttttttgtgttttaaggggttaattaatgtaaattgttttataaatatttgttaaattataaaaagaataaatggtaaggttgggcgtagtggtttatgtttgtaattttagtattttgggaggttaaggtaggaagattgtttgaatttaggagtttaagattagtttgggtaatatagtgagatttaattttataaaaaaattaaaaattagttgagtatggtggcgtaagtttgtagttttagtaatttaggaggttttagtgggaggatcgtttaagtttggaatgtggaggttgtagtgaattaagattgaattattgtattttagtttgggtaagagagcgagattttgttttaaaaatataaaaataaagaataaatggtagttagtaagtgagatatggtttgtattttttaatttattatatttcgtttatttaaatgtttttatttttttttttagaatgttttatttaaattatagagttttagagagatgataataatgataatattagggtagtaggatttttttttttgttttaaatatatttagttttttaaaggtgttatttttatgttttttagggaaaaatagattataaagatattgttttttatttttattaggttaatttttaattttaaattttaaagaagtattaaattggttgggtacggtggttggtatttaggggtttaagataatttgggtaatttagtaagattttatttttataaaaaaatttttaaaaattaggggtggtggtatgtatttgtatttttagttattagggaggttgtggtaggagaattatttgagtttgggaggttaattttgtagtgagttgtgattatgttattgtattttaatttgggttatagagttagattttgttttgtggggggtgggaggggaagttttgaatttttttattttaaaattaaataattaaatttatattaattgtattttaattaaatttggttagtatgtagttgaagtaagtaatgtttttttttataaatttaaagttttttattttttgattagtttttaataatgttatgtgtataaatagtcgtttttttgaagggaagaattagaagataaagtagttttttattggtgtattttagatagtattacgagaatatgagaaggttttttaaggttataggaagggtagatatttgttagtagatatttgtacgtatgtgtatggtgaggaggtagagaataaagatgtttttgatttaataatatttatttaaatttttagtaatgaaagttaaataagaaagatttggtagggcgcggtggtttatattattttagtatttcggaaggtcgatataggtggattatttgaggttaggagttttagattagtttggttaatatggtgaaatttcgttattattaaaaatataaaaaaaattcgttaggtattaagaggttgaggtaggagaatcgtttgaattcgggaggtagaggttgtagtgagtcgagatcgcgttattatattttagtttgggtaataagagcgaaatttcgtattaaaaaacgaaagaaagaaagaaaaagattttattttgtagatataattttttaatttttattgagttataattgaattaaagttgtttattagttttgtagagtaatttaagggattattgttgattttttaatattagagtaagattagatttataagaagtttttttattttttaataagaagtgttgttaggttatttagaaatttttttttcgagttttattgttatttcggaaatatgagaaattaagtatgttgtaattatggtttttttagtattggttttaaaataaattgagtaggttaagtaagattgttaatgaaatattgtttaatgaaaaaataaatagtcgaaggttttaggttttatttatttaatataggtattataataaatgatttagtataatgatagtttttaatcgtatttaataaaataaatacgtagtagaaattttttagttatatataattatattatatttttagattaaagttaatgatgttaatggaaagtataggtcggcgggtttattggtgataagttatgagattttgagtaaagaataagtaataaggttagaattttttagaagtgttaaggggaaagaaggtaataataataaaaatttttttatattaagagttttaagtattttgttgtttattaattaattttatattaataattttgtaagattgatattattaatttttattttaagtacgtggaataaaagaagaaagaggtaaataatatgtttaaagatttataaagttaagaaattatgcgaattggtggggtttcgggttttagaagttaatgtaaatatagtttttttattttttattaatagttattaaaattgaggttagtaagtttttagaagtttatttttttttgtaaatttttttttbatataatttttgtttttgtaagagatgttatatttaagcggtagttttaaaagtggggatatatgaaacgtatagttgggagagttatttagtttatttatatatgtgtaatatttttttgtagaaaaattttgtttattggagtttggaatttagagggtttttgagagttatataaatagttttaaaattaatttatttataattattgagtcgcgtatgtaggttatttatatagaaggcgttttttgaagtcggttaggttataatgagttttttgttgaagcggggcggcgggaggtttcggagagtagttcggttttttgcggcgtcgacgaagaggttacgaaagattttgttttgtgttcgtcggtttttttcgaggcgtcgaagtaggttagcgtatttcgatataggtcgggcgcgttattcggtgtagttgggagttgggttatgtgttttaggtcgcggcggggaaggggcgagattttcgcgattttcggcgttttttttttgtttttatttttgggtttttttttgaatggcgcgattttattagttttggattttgggtttgaggttttttttggttatatttttttttatagtttcgtacggcgagtcggtgtcgtattttagtttcggagtttgattttcgatataggttttcgagtcgtttcgcgtttttttttgttagcgagcggaatgtcgtgatttttgattttgttttttttttattttattagtttcgtaattatttgatacgtcgttttcgcgtttagggttttatatttcgggagttagcgttaagttgtaacgttttttttttttcgcgattggtcgataggacggtagtcgtatatttttattggttggagtttttgtagcggtcgggatgcgtggttcgtagattagggatttaggtttcgtttacgcggagtttggatgcggcggtttttggggtacgcggcggtttttggggtattcggcgggagttgtatgttgtttagttgttgtttgcgttggttagatttatatagtttttggattggggagttttagttcgttagtagtttggggatagataagatttttgttttagttcgtcgtggcgttacgttaggtattgataattaagttacgaggtatagttttattttgtaaagggtagttaggttaggcgcggaggtttatatttgtaatgtttagtattttgggagatcgaggcgggaggattatttgagtttaggagttcgatattagtttgggtaatatagtgagattcggtttttataaaaaattttaaaattagttaagtaaaggtcgggcgcggtggtttacgtttgtatttttagtattttggagggtttaggcgggcgaattatttgagatcgggagtttgagattagtttgattaatatggagaaatttcgtttttattaaaaatataaaattagtcgggcgtggtggcgtatgtttgtaattttagttattcgggaggttgaggtaagagaatcgtttgaattcgggaggcggaggtgcggtgagtcgagatcgcgttattgtattttagttttggaaataagagcgaaaatttcgtttaaaaaaaaaaaaaattagttaggtattacggcgttcgtttgtggttttagttattcgggggttgaggtgggagaattatttgggtttgggaggtggaggttgcggtgagataagatcgtgttattgtattttagtttgggtggtagagtaaaattttgttttaaaaaaaaaggatagttatttggaaggaatattttttcgcgtttttagagttatattatagtatttgttgttttattaagagtattttatatttgggaggaatcgagaaatattagttagtgtagttagtttgatcgttttaggtgtttttttaagttttcgtagtgaattgttttttttttcgtttagttgattcgattttttttagattttattttatttatttaaaagtaattttattttatcgttagttttagttttatatcgtattttttgttttgaagatgagattgttaaattggtgaagagggaataaatggtttaataaattatcgtaattttttgtaatgtcgtttatagttattaaaaatattagattttttcgttatttttatttttcgatttttcgtattgtttatagtattaaaggtaattgagtttttttatttacgtaaaaatagttaggagaaaattttattagtaagagagattaagaaatgaggaaaggagcgtgaattgtaaagagaaaaatttaaataaagtgcgaagtaaaaataaattcggggattaaaaaaaaggggggggggggtttggttttttggagtaggttggtttttatatagaattttttttggagaaaaaagaaaatgtataaattagttttgagattttcgttatagtatatttgtggagttttagaaaggtttgatgaagtttttttagatcggaattttttttttggtaatttttattataattagaaaataaaattgttagagttgtatttgttatttttttaggtttgtttagttgggtagtttttttgggttatttatttagtttatagtgtggagttgttttcgtttttagttgttttttttttatggtgtagaattagtttgatttttttaatgttagtttttgtttttatatatgaagataagtgcgttttttttagttagataaagggtatttttgggtgttttaagtaatatagttttttaaagacgagtaaggaattttaagaggtaaattacgttttttaaagtttaattagattttatttttgatttgtcgtgaaaagagaagtattatatatttgttatttttagatattaattaataatttattgagtttaaaaattttattttaagattttatttttgtattatttggtaggagtaagagtaggtggtaagtttgtgagtgttagtggttgaaaggggtggagtaagaaattgttttttttttttgttttttttggagtgtagttggtttaggttttataggtgtattaggattttgtttttttgagacgtgaggtgaaattattaattttaagtttgatagtgtatttgtattttttatataggtacgtgtagtattgaggtaattatgaggagttttagaacgtgggtggaaatgttgtttgttttattatttttcggatttaaaggattttttggttttagtttggttaattagtgatttacgagtagatattagagttacgtaaatttcggatttggtgtttgatggaaaagaaaaagaaaggaaaaaaatttagagattataagatagaagtttagggtaagtttagaattttttaatttgggaggaggggagttgaaagaatggggaaattttgttttagggaaataatttagacgataaagttgtataggagaagtattggggtggcgtaaaatataggagagaagaaaatagttttttgtaggtagtaggtagttttttagaagtttttaagaaaatttgtttagtattataaaaatataatagtttagaatggaaaagaaagaaaagtagtaatcgatttaaataagttaatgtaggtttttagtaagtggttttggtttttatttagaataattattgagttaggagaaagaattatggattttttgtttagggatttagatgaaaggtttttttgttttagggtttttttaattacgaaagttaaataattataatttgatttgttttttgtttttgttttatattaggtaatttttttaaggtaaagttgtttttgtagattggattgggggttaatttgttttatttgaagggaaaatagaagtatttgtaaaattatttacgaattaaagttttggtaggaaaaagtttatttgagtttaggaatttttattttgggtaatataaggagattttttttttataaaaaattttaaaattatttgagtgtagtggaacgtgtttgtggaatattttagttttttgggaggttgaggtgggaggattatttgaggttaggaggttaaggttgtagtgcgtcgtgattatattagagtattttagtttttgcgatagagtaagattttgttttaaaaaagtgggagtgtagaagggataaagaaatttgtaattgttatgagtgttaggtttagattacgttaaaggttatgttgaggttcggaggtagtgggtggatgagtagaaagaatatttggggagttgtagataggtgaaagatgattttatttagtagtagtttttattaatagtttttttatattgtttgttttgtttcgattgtttagtttggtttttatatatagttgtgtgttttttgtttttagggttagtagtttaattttttgagtatgagtaagttgagttgtgttttggttttttttcgtttatttgtaaaaaatatattttatttttgtttttttggtttttaatttatatttaagagtaattgataattttaattgaatttttattgtgtattaaacgttatatttaatattttataagtattaatttttgtagtaggttggtataaaaatttacgtttgtaattttagtattttgggaggtcgaggtaggtagattatttgaggttaggagtttgaaaatagtttgggtaatatagcgagattatgattttattaaaaaaataatttttataataaattaatggggtaggaagtattatttattattatttttattttgtaaattaggaatttgagatttggagtataatttgtttaaggatatagttagttagtggtaaagttaggttttgaatataaatttgttagatttacgagttaagatttaattattatattatattgggatttttattttgtatattttaaataatttttttttattaaaaaattgagataagaataatatagggtagttatagaagaatagaaaattttaggagtttaagattgtagtgaattgtgattatgtaaatgtattttaatttgggtaatagagtaagattttgtttttgaaaaaaaaaattaaaaaaaaaaataaaaaaaattattgtggattgcggttaggtatagtggtttacgtttgtaattttagtattttgggaggttaaggcgggaagattttttgagtttaggagtttgggattagtttggttaatatggtgaaattttgtttttaataaaaatataaaagttagttgggtgtggtggtaggtgtttgtagttttagttatttgggaggtttaggtaggagaattgtttgaatttaggaggtagaggttgtagtgagttgagagggtattattttattttagcgaaaaaaaaaaaattgtaggttgtaattagaatattttttttttttttttttttattaagagagttttgaagtaaagagattttttatttgggtttttgggtaggagatttataatttttttttagatagtttttatttagtcgttgttatattagatattagttattacgtttaattaagatgtagtttttaatataaaattaaataaaatgtaagtattttgtgatttggttttgttggtttttacgttttattttttatatgttttttttatgtttggttttatatatgataatatttgtgttgtttgtttttgtgta

SEQ ID NO: 165 - DNA, 5963 bp, Artificial Sequence
  chemically treated genomic DNA (Homo sapiens)
ataggttttatgttcgatttgtttggggtagaaagaggattgtatttgtagaaggtaataatgtgagtgagattaagagtttatgggaatagagaaataaagtaaaaataaaaagagtataagtgatttaggaatttttaaattttggttaaggtattgatttatgttagtatatgttttggggtttgagttattttaatattaaaggaaatattaattttaggatgttaaaaattttgggttatttaggtaggagatgttaatttttttgtagtagaattttgtagtaaggaataatataatatagttttgttaaaagaagatatagtattgtaggtattgttttagtattttatttttgtatttggtatattgttggagatgataggtagataatatgtttatttttatagatgtttgtaatgagggagaaggaattagttttttgaaatttttaggaaagtttaaggaggatttgttttattaagatatggtaagaagtgttatatggaaaattagttgatggtagtttttagagggttaggtattttggtttttgaaatattgtattggtatagtagtttttttttttttttttttatggaggttagagatttggaaattgaattgggtgggaagttgtgattagtgtagtttttgttagaggaggtttttaatattgtggagttatttgaagattatagaaatgtagtgttaatggttatttagtatttttagagtaacgttgttttgtatatatgattttaataattaggattatttttttttttttatagtaggtagttgtattttttaggatgaattttttttagaattatatattttagagtaggaggttgttttgagttttttttaggaaataagtgatatttatgattatattgattgttttagttttaattaggaattattttttaaggttttgttaagttagatagggattaagatagttattttagattttcgaacgcgtttttggttattagggattatttaagtaggtaatatttgtttgggagttttataataggtgtttattattgtatagatgtaaggaataaatttgagtaagagttaatgaatttgtgaatatggttgattattatatttttattagttgatattggatttttgtttagagaaaggagttttttaaatgaagagtaggtaaaagtaagatggttttttttattggattaatatatgtatggtttaatagaatattttttagtgattagatttaagagtttgagggttgaagttttgagttgttttaggatttaagttatgatttaagaatatgggatatggaattaatttattataagtgttagttattggggaggttatgggaagtgttagaattataattaaaattagaatgaggataaatattaaggaaataagaaattaaaatgtaggaagtaatttttaattagaaggtaatttagtattaattttgtttagtatttttttgattggtttaaatatatagtatttgttttgtagtgatttaaaggtttgtatttgaaatatatagtttattaatttttagagaattagagtgaattaggtggatttaatattaaaatgatattattttttaatttatatatttgtttttcgtggcggtaagaggggtaggatggttgggttattttttttggttttggttttggtttgttttatttcgtcgttatggtttaggatgagggtatatatttggaggggacgtaggacgtcggtagagaaggagtcgggtggagttgtggtttcgttgaggaagttttgtagatatatgtattgtatttttatttttataaagtttggttattagagtattatgaatattaatgattttaaatttaggttgtttaaagttgagtaagaatatttattacgtttttggaatgagtttgaagaagtttgataggtagaattttatgtagagttttaggttatcgatttttaggaattgaatttttttttttaaaaggttattgaaggatttaattagtttttttattaagaaaaggtggatgcgtgaatggaatttgtttttcgagaagtattgggtagtgttgtagggaagttagattagttttaggtttgggaaagtaaagttttttagatttttgagaataaagttatagttgttttagttggtgggtaggggattagattcgttgtatatttaaaggggatgtatgatgttggtttgttattttataagatatttttttagatttaagtagagtatattttgaagttataatagttagttgaaaaatattatggtaataaatgtattattttatataatgattagtggtagaatagtagaatttataaaggagttttttattaagtataagtattttggtttaaaaaaaatagaaaatataattttttttttagtaaggaatgttttttgttatgagttttgatgggtaaattattttggaagagaagaataaagtttttatggttttagatgagaatggtggtttttgttaggtttttgtagtttggtatattgtggaggatatggagtaaagaggtatttggaatattcgtgtttattgtgttgatagtgtattagtaaaagtggtagatttacggtttattggattttgtatttagaaaggagtagattgtggagtaaaggtggtagagaaaataaattttatagaattggttggagtggtttgtcgagtggatggattttattaggtggtagaatatagtgatatttttttggtaatagtttagaaatgaagtttagatggatgattgttgtttaatgtggggaatattgttaattatttatttattgtattatttttgagagatgttgttaatgtttatgaattttagttgtagtattatgtggtttaaaagaagattttttatgtggatatttaatagtatttaattaagttagataaatttagtggaataagtatggaaaaatttgttttttttataataagtatagaaaaattttttagtttataaagaagtttgtggtttatgaaatattatgggaagatgatttttttatattaaagaatgttgatagttagaatgggaaagataattttattatcgtaaggtatatttttattattgttgggtttttaatgtaggggttattttatagatgaaaatggttattattttttagtaattttttatttaaaggatgttaatgatgtattaatttagtgtgaaatttttttttttatttttaatgttgaggaaggaatagaaagttatgtggtagatatagaattttatgtatttttaattatcgatgagaatggagtttatgagttggtgaaaaatggtatatgaatttgatattaagttttattataataggaatagtttttgtttttgatagatcgattgtgaatttataggattttttggatgattgaagtttaaatatttatagggttttattttgtttgttgaatttttagagttattgtaaattttttaagatttagatgattgaattttagatattatttttattatttttaatttattgaaggttttatttatattttttaattgtgtatttttttttaaggcgaggaaattattggtaatataagaaattttttatagtcgaattatagttaggatgtttaatattattttatttggagttggaggtatttgtttttgaagttgtgtatagtaataatatgttattgtagatgttgaaaggtttttatggtattaaaagtttattttattaaatatttaattttttaaaggaaataattggatagtaaaataaatatatttttttgtttttggaaaataataaaaatttgttttttttttttagtttttatttatgtatattattgaatagttgattttttatgaatagattgaagaaaaaattattattattatagataagtaattatttagttttttttattttggatggtaagtaaaattaaatatatggaggtaagaattattgggtaaagtattttttatttttgtgtataattgaaatgatattatttaaggtgattgtatttgaatatatttttaattatgtattatttaagaagtaaaatggttttaggcgggtaggggtaggaataatgggaagttataagagtgttggatatagagaaggtataaagtaaatcgttgtttgttatttattatgtagatattatattgttttttaaattattttttgtatattttgtttagttaaaaataatttttagtgataagaagtaggtattttgcgaggtattggggaaataaaggaaaaatatattttttgtttttgaggagtttataatttagaaatgaagttaaaagagtaaataaatatttgtaataaattttaaaaaatatgtaaaatgaaaaaatattttgattagtataagagtttaaaatatgattattttttttgatgaaaaatttttttattaaggagaaaagattatggttttatttttatgttgggcgtgtattgagttattaatttatgattttagattttatttaagattttgtaatagttggttttttgtttttatttgttatatattttgtgttgtttttatattagaataggatggtagatatatttatgtttaaaagtaaatatagtatttgaatttattttattataggtaattatatggtggatattggggatattatatttattttgaatgagttataggaatagtatgaggatgtttgtaagtgagtttttgttgttatgataagttttgtttataattaaagtttttatattaaattttaatttataagttttattttataaagggttttgaaaattttttttgaataatttatttttttacgagcgcggtcgcggtttcggtcgttttgggcgattgtgttggcgttgggggcgttggcgggcgttggcgtaggaggtgagtgaggtttcggttcggtagcgtcgtagttgttttaggatttgcgtttcggttaagttgcggatttggagtcggtaaacgcggagggttggtttcgcgcgtttgcgttgggaatgcgcgtgttttggttggcgcggtcggagtcgggagttggggatttttttggttcggcggtggcggggttgagaggtgtttggtgtttgggagcgggtttttcgagacgtcgaagttattagttaggttgagcgtttttttcggtcgtcgcggcgcgtacggtgcggtgggcgtatttttgagtttcgcgtttattcggggttgcgcgcgtcgcgggtggttttggtcgggttaaggacgattggtttaggagttaaggcgaggtggggttttcgggggttgttttcgcgttttggtagagggatgtcgttgtagttttttgggtgagagcgtgcgcgcgcgcgggtttgttagtttttttatatttttaattttttttgttacgttttttttagaaggttttttttttttttttttttttttttttttttttttttttatttttaatttggttttttgcggggttgttttggagtaggatgagggttttgttttttttagtgtttttaggtggtagcggtgtttttgtttttagggtagattttgtattcgaaaaatttttagtgtattcggggagttatgaaaaggtttttttgggtcggtgggatttttggttttgtttttggttgttgcgtatatcgttagtcgttagggtaattggtattcggtttttttggtattggggatataggtggagggatggagtatagttcggggttgttgttcgtggttttttttgagtttttggtgattttgtttgggttggagagaaattttggtttttggtttgttggggtcgtttttgttttagaggatgatataagagtgtatgtaagtatttttaataaaaattgtagtattcgtaaaata

SEQ ID NO: 166 - DNA, 5963 bp, Artificial Sequence
  chemically treated genomic DNA (Homo sapiens)
tgttttacgagtattatagtttttattaaaaatatttatatgtatttttgtgttattttttgaggtagaggcggttttagtagattaggagttagggtttttttttagtttaggtaaaattattaaggatttagagaggattacgggtagtaatttcgggttgtgttttatttttttatttgtgtttttagtattaaagaggtcgaatgttaattgttttgacggttgacggtgtgcgtagtagttagagataaagttaaggattttatcggtttaagggagtttttttatggtttttcgaatatattagagatttttcgggtgtagggtttgttttgggagtagaggtatcgttgttatttggggatattggaggaggtaaagtttttattttgttttaaaataatttcgtaggaagttaagttgaaggtaaaaaaaagaaagaaagaaagaaaaaaggaaaagaaaaaattttttggagaaagcgtaataggagaaattggaaatgtggggaaattggtaaattcgcgcgcgcgtacgtttttatttaggaagttatagcggtatttttttgttaaggcgcgggaataattttcggaagttttatttcgttttggtttttgggttagtcgtttttggttcgattaggattattcgcgacgcgcgtagtttcgggtgagcgcggggtttagagatgcgtttatcgtatcgtgcgcgtcgcggcggtcgggaaaggcgtttagtttggttgatggtttcggcgtttcggaggattcgtttttaggtattaggtattttttagtttcgttatcgtcgggttaggaaggtttttagttttcggtttcgatcgcgttagttaggatacgcgtatttttagcgtagacgcgcgggattagtttttcgcgtttgtcggttttaagttcgtaatttgatcggggcgtagattttggggtagttgcgacgttgtcgagtcggagttttatttattttttacgttaacgttcgttagcgtttttagcgttagtatagtcgtttagagcggtcggggtcgcggtcgcgttcgtaagagggtaaattatttagagaaggtttttaaaattttttataaaataaaatttataaattaagatttaatgtaaagattttaattataaataaaatttgttatagtaataagagtttatttataaatatttttatattgtttttgtagtttatttaaagtaaatataatatttttaatatttattatgtggttatttgtaatagaataagtttaaatattgtatttatttttgaatatagatatatttgttattttattttaatatgaaaataatatagaatgtgtggtaagtaggaataaagagttaattattataaagttttgaataaaatttgaaattatgaattaataatttagtatacgtttaatataagagtaagattatggttttttttttttaataaaagagttttttattaaaagaaatagttatgttttaagtttttatgttaattaggatatttttttattttatatgttttttagagtttattataggtatttatttatttttttgattttatttttagattgtgaattttttaagaatagaggatgtgttttttttttgtttttttaatgtttcgtaaagtatttattttttattattgaaaattatttttggttgaataaaatatatagaaggtgatttaaaaaataatgtaatgtttatatagtgaatagtaaataacgatttattttgtattttttttgtgtttagtatttttataattttttattatttttgtttttgttcgtttaagattattttattttttggataatgtatgattgaggatgtgtttagatgtagttattttgaataatgttattttaattgtgtatagaggtagaaaatgttttgtttaatagtttttgtttttatatatttgattttgtttgttatttaagatgaaaaagattgaataattatttatttataatagtgatggttttttttttagtttatttataagaaattaattgtttaataatatgtataagtgaaaattgagaggaagaagtaaatttttattgttttttagaaataggaagatatgtttattttattgtttaattattttttttaaaaagttgaatgtttgataaaataaatttttggtattatagaaattttttaatatttataatgatatattattattatgtataattttaaaaataaatgtttttagttttaagtaaagtgatgttgaatattttgattatagttcggttgtaggaaattttttgtattgttaatggttttttcgttttggaaaaaaatatataattgaaaaatataaataagatttttaatgagttgggaataataaaaatgatatttgaagtttagttatttagattttgggaagtttgtagtagttttaagggtttaataagtaaaataaaattttgtgaatatttaaattttagttatttaggaggttttgtaggtttatagtcggtttattaaaaataaaagttatttttgttgtggtagaatttggtattaggtttatatattattttttattagtttatgaattttatttttatcgatgattaaaggtgtatggaattttatatttgttatataattttttattttttttttagtattagagataagaggagagattttatattggattggtatattattggtattttttaagtgggaaattgttggaagatgatagttatttttatttataaagtgatttttgtattgagaatttagtaataatgaaagtgtgttttgcggtagtagagttgttttttttattttgattgttagtattttttagtgtggaaaagttatttttttataatattttataaattatagatttttttgtgaattagaagatttttttatatttattatggaaaagataaatttttttatatttattttattgggtttatttggtttaattaagtgttgttgggtatttatataaggaatttttttttgagttatatggtgttataattgaggtttataaatattgataatattttttagaaatggtatagtgaataaatggttggtaatattttttatattgaatagtagttatttatttgagttttatttttgagttgttgttagggaaatattattatattttattatttggtaaaatttatttattcggtaaattattttaattagttttgtagggtttgttttttttattatttttgttttatagtttgtttttttttgaatgtaaaatttaatgaatcgtgggtttgttatttttattaatatattgttaatataatagatacgaatgttttaaatgtttttttgttttatattttttataatatgttaggttgtaagagtttgataaagattattatttttatttggagttatagaaattttgttttttttttttaaaataatttgtttattaaaatttatggtagggagtattttttattgaaaaaaagattatattttttattttttttaaattaaagtatttgtgtttggtgaagaatttttttgtagattttgttgttttgttattgattattatatggaataatgtatttgttgttataatattttttagttaattgttgtagttttaggatatgttttgtttgaatttgaaaaagtgttttatgggatggtaaattaatattatatattttttttggatatgtaacgagtttagttttttgtttattagttagaataattgtgattttgtttttagaaatttggaaaattttgtttttttaggtttggagttgatttagtttttttgtagtattgtttagtatttttcgagggataggttttatttacgtatttatttttttttgatgagaggattggttaaattttttaatggttttttggaaaaagaagtttagtttttgaaagtcgatggtttggagttttgtataaagttttatttgttaggtttttttaagtttattttagaaacgtagtgggtgtttttgtttagttttggataatttgagtttaaggttattagtgtttataatgttttgatagttaagttttgtgaaaataggggtgtaatgtatgtatttataaagtttttttagcgggattatagttttattcggttttttttttgtcggcgttttacgttttttttaaatatatatttttattttgggttatggcggcggggtggggtaagttaggattagggttaaggggagtggtttagttattttgttttttttgtcgttacgagaagtaaatatgtaaattaaagaatagtattattttggtgttgggtttatttgatttattttgattttttgaaaattggtaaattatgtattttaggtgtaggtttttaaattattgtaaagtaagtattatgtgtttgaattaattaaagaaatgttagataaaattggtgttaaattgttttttgattagagattgttttttatattttggttttttatttttttggtatttatttttattttggttttgattatagttttaatattttttataatttttttagtaattggtatttgtggtagattgattttatgttttatgtttttagattatggtttaagttttaagataatttaaagttttaatttttaagtttttgaatttgattattgaaaagtattttgttagattatatatgtattaatttagtggaaaaggttattttgtttttatttgttttttatttagaaaatttttttttttgaatagaagtttaatgttaattaataagagtatggtagttaattatgtttatagatttattagtttttgtttaaatttattttttgtatttatgtaataataaatatttattatgaaatttttaaataaatattatttatttaaatagtttttagtggttaaagacgcgttcgagaatttgaaatgattattttggtttttatttaatttagtaaaattttaaagaatgatttttggttgaaattaaggtaattaatatggttataggtattatttattttttaaagggagtttaaaatagttttttattttaaggtatataattttggaggaaatttattttggaaaatgtagttatttattgtgagaggaaaaaaatgattttaattattaaggttatatatgtaaggtaacgttattttgaaggtgttaagtgattattaatattatatttttgtaatttttaggtagttttataatattgaaagttttttttagtaaaaattgtattagttataattttttatttagtttaatttttagatttttaatttttatgagagaaaaaaaaaaaaaattgttatattaatatagtattttagaaattaaaatatttgattttttaagaattgttattagttgattttttatatggtattttttgttatattttaataaagtaaattttttttggatttttttgaaaattttagggggttaatttttttttttttattgtaaatatttataaagatgaatatattatttatttattatttttaataatatattaaatgtaaaaataagatgttggaatagtatttgtagtgttatgtttttttttagtaggattgtgttatattattttttattgtaaaattttgttatagaaaaattaatattttttatttgggtgatttaaaatttttggtattttggggttaatgttttttttaatattaaaatagtttagattttagagtatatattaatataaattaatattttgattaaaatttgaggatttttgagttatttgtgttttttttatttttgttttgtttttttatttttatggatttttgattttatttatattattattttttataggtataattttttttttgttttaagtagatcgaatatagaatttat

SEQ ID NO: 167 - DNA, 7607 bp, Artificial Sequence
  chemically treated genomic DNA (Homo sapiens)
  unsure (4)
tttnggttgtttatttttatggttattttttgatgatatgttaaataaggggtgaattatttttgttttttcgttttagattatatagggtaattttttaatgtcgttatggtatttgtaaattgttatggtattgatgggagtttagtattgaggataattagagattattgtcgtggttatcgtggttttggtgggttttagttggttattttattgtaatttgttttattagtaaggtttttatgatacgtattttgtgttgattttttattttattttgtgatttagaatgtttaattatttaggaatgtagtttagtaggttttagttttattttatttagtttttatacgagatagagtcgttttggtttaaacgtttttgatataagtaatttgcgtattaaaggttgttataatatttttgttggttttgtttgttaatgataatttataaattttaaagatttatttagagagggttgggtacggtggtttattttgtaattttagttatttatgagtttgaggtaggagaatcgtttgaatttgggaggtagaggtcgtagagagttgagattgcgttattgtattttagattggcgatagagcgagattgttttaaaaaaaaaaaaaaaaattattattaatttatttgttttttttttagttttaatttaattggtaaattttgattatggttgaatttaggtattttttttgtgtttgtgtttgaatagaaatgtgttagaagagaaaaaaaaaaaaaagaaattggagagaatgatttcgttttattttttttttttattttttgagatggagttttgttttgttatttaggtcggagtgtagtggcgcgatttcggtttattgtaattttcgttttttgggtttaagcgatttttttattttagttttttgagtagttgggattataagcgttcgttattatgttcggttaattttttatttttagtagaggcggggttttattatgttggttaggttggtttcgaatttttgattttaggtgattcgtttattttagttttttaaagtgttgggattataggtatgagttattgcgttcggttttcgagtgttattatttttttgattttggaaaggttatttaattttgtagatcgttattttttttatttttgattggattaatggtaattgtatatttatttttatagttgaagtttgatatataggtagttttgtatttgtgttatgtgagtttttgatgttatatatatgtaggttatttttgtagtagtagaattgatgttttttattttgatgagtgttattttttaagttttaatattaaatttagtgaaaagagatgaattttggaattataatatttgtgttcgtatttgtgttattgagtagaatgattttaggagataggtgatgaataagtgaggaaatatatttgttaattttttaatttttgtagtatttttttatttgtaaaaaagaggtaataatagtggttaatttatagtattgtaatgtttaaatgggatagtaatttatataaaaattatttttgaattataatgttttatgtgttatggtttttatatgttgggagggtgggggagaagggtagtttgttttattttaggtttaaattttttgatttattgagtataagtgttaaaaatttaaatatgtttagtttattagtgaggtaataatgtttttttttttttgttttgtatattttttggaattgattagttttaatgtgatatttattgattttgaaatattatatagagatgttgttttttgattattgtatgttgtgggtattatgataaagattttgattttttgtttttttgaagtaagtttgatatgttagttattaataatgtatgaaaaagaaattataaattggaagatttaaaaaattaatattggcgttgttgttgttaatttttttattgagatagattagattttttttttttattaaattttggttatagtttttcgcgttaggatttaaggaatatagatggatcgataattagaggtatgaggattggataatagagttttagatagagtttatgattagtttttggtttgtaataattatatgtttttgtgttttaggcggaggtttgaagatggttagatttttgtgagtttatgatattgagttgtaagatttgaaagtttttttgttaggttttgtggtcgtttttaaaatttttttttagggagtgtttgacgtgagtttaatagttttttgttgtgtgtaagtgaaataatttaaggagtattttgtttttttattttgttatcgtaaaaggttttttagaattatagtgtttgtttcgtttgttttttgttagttttatttggtttttgttattttatgaggttggtttagggtgaagagtagggaaggttttagggaatttttatatttagtttgtttgtattttttttttattttatggacgtaatatggtcgttgttggttgagtttagaggagattggttaattttttttatttgtttgaggtagtagtaggaataaataattttgtttgaaatttgtaagttgtgtggtgagagtttgatagtaaagtaggtggttttaaatttgattgtgaattagaattacggttttagcgtagggatttttattcggattttttttttttattattgatggtagtggtgatggtggtaatggcggtgaggagtttgggaattttatatttataattaggatagtgatttttgtttttaggtaaatgttagtttttattttgttttttagaatttttttttaaattatatttatttatttatttatttatttatttattgagatatagttttattttattatttagggtggagtgtagtgtacgatttcggtttattgtagtttttgttttttgggtttagttaatttttttgttatttgagtatttgggattataggtgtgtattattatgtttgatttttgtttttgtttttacgtggttttttttttatgtgtttttatttttttttttttttttttcgaggtggtgtttcgtttagttgtttaggtttattataatttttatttgttggattaagggattttcgtgttttagttttttaagaattgggattataggagtacgcgttataacgtttgttaagttttattttttgagacggagttttgttttcgttgttaggcgggatgtaatggtataatttgggtttattataatttttgttttcgggtttaagtagtttttttgttgtagtttttcgagtagttgggattataggtatgtattattatgttcggttaattttatatttttagtagagatagagtttttttatgttggttaggttggttttaaatttttaattttaggtgatttgtttgtttcggttttttaaagtgttgggattataggtgtgagttattacgttcggttataatttttgtatttttaggagagacgaggttttattaggtttattaggttggttttggatttttgattttaagtgattcgtttattttggcgttttaaagtgttgggattataggcgtgagttagtgtatttggttatttttttttatagggatgttttttattgggttttgggtttattaaggtaatttaggatgattttattttaagatttttaattatatttgtaaagatgttttttttaaataagattatttttataggtgttgggggatatgtttttgggggagggtattgttttattcgttggagtgggttgtatgtatttttgttatttttggttagattttttgttagtggttggcgttggttgtgagggagataagatgagaaagtgaggtttgtgttttattatttaagttttgttcgtagagaaaaatgtagaatattgttatttgatagagttattaaatggtagtatttttttttttgaattgttttgtttttaggtattatgtttgaaaatatttttttatattttaaaattttaaggtaattttaatttattttttatggaggtgaagagaatatgataggatattattttattttagtttaaaagttatagatttatatttggttttgagtaaattagtagtatattgtttttttttagatagaaataaggtaatttttttttattattttttaggtagggtttttttttatatagttttaatttttttgtagtttaatatatatatagttttatattgtaaattgtataattttgtggatttaaaaaatatagttaatataggtttgttgtagtaaaatttaagtaatatagaaatgaaagtaaaaaattgaaagtttttttttttttttcgtattgtttggtgtagatttttttgaatttttttttatggattgtgtgggttttaggaattgtattgagttaagaatattagatatataaaataaagtaaatattttgtttgttttaattgtttatttttgtttttgtgttttttgtttgtttgttttgagttggggttttgttttgttatttaggttggagtatagtggtgtgatcgattatggtttattgtagttttaaatttttgggtttatgaaattttttttttttagttttatggttaatttatttttatttttatttttgtagagatagggttttgttatattgattaggttggtttcgaatttttggttttaaatagtttttttattttagttttttaaagtgttgggattatagatgtgaggagtgggttatggtatttggttaattgtttgttttgaggatagtaaattgtttttaaatttattttagtagtatttttatgtgtttaataattagagttttttaggtttttaggtttagtttggagatggattattgttaaatgaaaggaaagttttagtttatgaaagttatttgttgtttttatttgtttttgtagattataaaatttttttatttttttttttttgtagatttaatttagagattgattttattatagaatttatagttgtattaatggttggggaaagatagtggtaataggtaaaggagaaatagttttgatatataaagaaaatgagtatgttaaagttaagtgggtttaaggtttttattaagattttgaagtttggaagtatagttttgaagatatttacggttggtaatattttacgttttttttttttttattttatatggagattttaatttgttttttaattttaaaatattattttatatttgtttatatttttgaaaatatttgaaagatttttttttttttttgagatggaatttaattttgttatttaggttggagtgtagtggcgtaattttggtttattgtaggtttcgttttttgggtttaagcgatttttttgttttagttttttaagtagttgggaatataggcgtatattattacgtttagttaatttttgtattattagtagagatggggttttattatattggttaggttggtttcgattttttgatttcgtgatttatttatttcggttttttaaagtgttgagattataggcgtgagttattgtgttttgtattttttttttttttttttaaagatggagttttgttttattttttaggttggagttagtggtataatttcggtttattgtaatcgtttattttcggggtttaagcgatttttttgttttagtttttttagtagttgggattatagatatatgttattatatttagtttatttttgtatttttagtggagatgggttttattatgttggttaggttggttttgaatttttgattttaagttatttgtttattatagttttttaaagtgttggattataggtgtgagttattatgtttggtttgaaagaatttttaattgaaagacgtaaaattttatatgtggagagtttaatgaatttttgtagggttttttgtttgtttttttgtttttgagataaggttttattttgtcgtttaggttggagggtagtggtattgttatggtttttagcgttttaagtagttgggattataggcgcgttttattacgtttggttaaattttgtatttttagtagagatggggttttattatgttgtttaggttggttttgaatttttgattttaggttatttgtttgttttggttttttaaagtgttgggattataggtatgagttattatgttaggtttggtttttgtttttttttttttttgagatgttgtattgttttgttattaaggttggaatgtagtggtttaatttcggtttattgtaatttttattttttaggtttaagcgatttttttgttttagtttttagagtagttgggattaatggtatttattattatgtttggttaatttttgtttttttttggttttgttttgttttttgagacggagttttatttttgttgtttaggtaagagtgtagtgatatgatttcggtttattgtaatttttgttttttaggtgtaagcgatttttttgttttagtttttcgagtagttgggattataggcgcgttttattatgttcggttaattttgtatttttagtagagatggggtttttttatattggttaggttggttttaaattttcgattttaggtgatttgttcgtttcggttttttaaagtgttgggattataggtgtgagttattgtattcggttttatattttttagtaggaatggggttttattatgttgattgggttggttttaaattttagattttaaatgatttatttattttagttttttaaagaagtgggattataggcgtgagttattgtgtttggaatagttttagtttttattagtttcgattgattatttaattgtggagtagtgttatttagtgaatgtgaatggatatttgtttatgatgtgtagggtggcgggtgtagtaaataatgaaattagattaattatgaatataggtttggaaaaaggattgattttattttttttttattttgattttttttaattttaattgtaaataaaggaataaattttaattattagtttgcggagtttagtagtattgaagatggtagtgaaggattagttatttttggtttttttgtttaaaataaaatagtataaaataaataaaaatattttggtgaggtatagtggtttatgtttgtaattttaatattttgggaggttgaggcgggaggtttatttgaggttaggagtttgagattagtttggttaacgtggtgagatttcgtttttattaaaaatataaaaattagttagatatggtggtgtatatttgtaattttagttatttaggaggttgaaggaggagaattatttgtattcggaaggtggaggttgtagtgagtcgagattatattattgtattttagtttgggcgatagagcgagattgttttaaaagaataaaaaattatattttaaaatatttttttaagagttttgggttatttttgtgggttgttggttttttttagtttttttttaagttagaggttgtttgtttgaaaattaaatcgaattttttatgattttttgtttttagt

SEQ ID NO: 168 - DNA, 7607 bp, Artificial Sequence
  chemically treated genomic DNA (Homo sapiens)
  unsure (7604)
attgaaaataaaagattataagagattcgatttaatttttaagtagataatttttaatttaaagaaaaattagagaaagttaatagtttataggagtagtttagaatttttagaaaggtgttttaaagtgtggttttttgtttttttgagatagtttcgttttgtcgtttaggttagaatgtagtggtgtgatttcggtttattgtaatttttatttttcgggtataagtgattttttttttttagttttttgagtagttaggattatagatgtgtattattatatttggttaatttttgtatttttagtagagacggggttttattacgttggttaggttggttttaaatttttgattttaggtgaatttttcgttttagttttttaaagtgttaggattataggtatgagttattgtgttttattaaagtgtttttgtttgttttgtgttgttttgttttaaataaggaagttaagaataattgattttttattattatttttaatgttgttaaatttcgtaaattggtagttgaggtttatttttttatttgtaattaagattagaaaaagttaaagtaagaaaaaaataaaattagttttttttttaggtttatatttataattggtttgattttattatttgttatattcgttattttgtatattatgagtaaatatttatttatatttattaaatagtattattttataattgagtagttaatcgaagttgataaaaattaggattattttaggtatagtggtttacgtttgtaattttatttttttgagaggttgaggtgggtggattatttgaggtttggagtttgagattagtttagttaatatgatgaaattttatttttattaaaaaatatagggtcgggtgtagtggtttatatttgtaattttagtattttgggaggtcgaggcgggtagattatttgaggtcgggagtttgagattagtttgattaatgtggagaaattttatttttattaaaaatataaaattagtcgggtatggtggagcgcgtttgtagttttagttattcgggaggttgaggtaggagaatcgtttgtatttgggaggtagaggttgtagtgagtcgaaattatgttattgtatttttgtttgggtaataagagtgaaatttcgttttaaaaaataaaataaaattaaaaaaaaataaaaattagttaggtatagtggtgggtgttattaattttagttattttggaggttgaggtaggagaatcgtttgaatttgggaggtggaggttgtagtgagtcgagattgagttattgtattttagttttgataatagaataatatagtattttaaaaaaaaaaaaaaataaaaattaggtttggtatggtggtttatgtttgtaattttagtattttgggaagttaaggtaggtagataatttgaggttaggagtttaagattagtttgggtaatatggtgaaattttatttttattaaaaatataaaatttagttagacgtggtggagcgcgtttgtaattttagttatttgggacgttgagagttatgatagtattattgttttttagtttgggcgatagagtgaaattttgttttaaaaataaagaagtaaataaaaaattttataaaaatttattaagttttttatatataaaattttacgttttttaattaaaaatttttttaggttaggtatggtggtttatatttataatttagtattttgggaggttgtggtaggtagataatttgaggttaggagtttaagattagtttggttaatatggtgaaatttatttttattaaaaatataaaaataagttgggtatggtggtatgtgtttgtaattttagttattggggaggttgaggtaggagaatcgtttgaatttcggaggtggacggttgtagtgagtcgagattgtgttattgattttagtttggggaatagagtaagattttatttttaaaaaaaaaaaaaaaaaatgtaaggtatagtggtttacgtttgtaattttagtattttgggaggtcgaggtgggtggattacgaggttaggagatcgagattagtttggttaatatggtgaaattttatttttattaataatataaaaattagttgagcgtggtagtatgcgtttatatttttagttatttgggaggttgaggtaggagaatcgtttgaatttaggaggcggagtttgtagtgagttaagattgcgttattgtattttagtttgggtgatagagttagattttattttaaaaaaaaaaaaaaattttttaaatatttttaagaatatgaatagatataaaataatgttttaaaattaaaaagtaaattgaagtttttatataggataaggaaaggaaaagcgtaaagtattattagtcgtaggtgtttttagagttgtgtttttaggttttaggattttggtgggggttttaagtttatttggttttagtatatttattttttttgtatgttagagttgttttttttttgtttgttgttattatttttttttaattattgatataattgtgggttttatagtgaagttagtttttggattaaatttgtaaagagaaagaaataaaaagattttataatttataggagtaagtaggaataataggtagtttttatagattaaagttttttttttatttgataataatttatttttaggttgaatttaggaatttagaagattttggttattaaatatatgaaaatgttgttgaaatggatttaaaggtaatttattatttttaagataagtagttagttaggtgttatgatttattttttatatttgtaattttagtattttgggaggttaagataggaggattgtttgaggttaggagttcgagattagtttgattaatatagtaagattttgtttttataaaaataaaaataaaaataaattagttatgaggttgagggggaaggattttatgagtttaggagtttgaggttgtagtgagttatgatcgattatattattgtattttagtttgggtgatagagtaagattttaatttaaaataaataaataaaaaatataaaaataaaaataagtaattaagataaataaagtgtttgttttgttttatatatttaatgtttttagtttagtatagtttttaaaatttatataatttataaaagagggtttagaaaaatttatattaaataatgcggggagaaaaaggaagtttttagttttttatttttatttttatattgtttaagttttattataataagtttgtattagttatattttttaaatttatagaattatgtaatttataatataaaattatatatatgttaaattataggaagattaaaattatgtaagaaaaagttttatttgggaagtgatgagggaaaattattttgtttttatttagaaaaaaataatatattgttggtttatttaagattagatatgaatttatgatttttggattaaggtaaaatagtattttgttatattttttttatttttatagaaagtgaattgaaattattttggggttttggaatatagggaaatatttttagatataatatttaaaaatagaataatttaaagagaaaaatgttgttatttaatgattttgttaaatgataatgttttgtatttttttttgcgagtagagtttggatgatgaagtatagattttatttttttattttgttttttttatagttaacgttagttattggtaaagaatttggttagggatgataaaggtatatgtagtttattttagcggatggaatagtgtttttttttaaagatatgttttttagtatttgtgaaagtgattttatttggaaaaagtatttttgtagatataattaagaattttgagataagattattttggattattttggtaggtttaaaatttaatgaaaagtatttttataagaagaagtgattaggtgtattggtttacgtttgtaattttaatattttgggacgttaaggtggacggattatttgaggttaggagtttaaggttagtttggtgaatttggtgaaatttcgttttttttaaaaatataaaaattatggtcgggcgtggtggtttatatttgtaattttagtattttgagaggtcgaggtaggtagattatttgaggttgggggtttgagattagtttgattaatatggagaaattttgtttttattaaaaatataaaattagtcgggtatggtggtgtatgtttataattttagttattcgagaggttgtagtaggagaattgtttgaattcgggagtagaggttgtagtgagtttaggttgtgttattgtatttcgtttggtaacgagagtaaaatttcgttttaaaaaataaaatttagtaggcgttgtggcgcgtgtttttgtagttttagtttttggaaggttgaggtacgagaattttttgatttagtagatgaaggttgtagtgagtttaggtaattgagcgagatattatttcgaaaaagaaaaaaaaaaagatgagaatatatagaaagaaggttacgtgaaaatagaggtagaggttaggtatggtggtatatatttgtaattttaggtatttaggtggtaggagaattggttgaatttaggaggtagaggttgtagtgagtcgagatcgtgtattgtattttattttaggtggtagagtgagattatgttttaataaataaataaataaataaataaataagtgtggtttgggagaagattttgaaggatagagtaagaattggtatttatttgaagatagaagttattattttgattatgaatataaaatttttaagttttttatcgttattattattattattattgttattagtgatgagggaaagagattcgggtgggagtttttacgttaaggtcgtagttttgatttatagttaggtttgaaattatttgttttattgttagatttttattatatagtttgtaagttttaagtagagttatttgtttttgttgttgttttagatagatagaagggattggttagttttttttagatttagttaataacgattatgttacgtttataaaataagagaaggatgtaaataggttaagtgtagaaattttttagggttttttttattttttattttgggttaattttatagagtgataagggttaggtagaattgatagagaatagacggagtaggtattgtggttttggaaaattttttacggtgataaaatgaaagaataaaatgttttttaaattattttatttgtatataatagggagttgttgggtttacgttaagtattttttaaagaggaattttgaaaacggttataagatttaataagggaatttttaaattttgtagtttagtattataaatttataaaaatttgattatttttaagttttcgtttaaaatatagaagtatgtggttattataaattaaagattaattataagttttgtttagggttttgttgtttaatttttatgtttttggttgtcggtttatttgtgttttttgaattttaacgcggagaattgtgattaaggtttaatgaaggagaaaaatttagtttgttttaataaaagaattagtagtaataacgttagtgttgattttttaaattttttaatttataattttttttttatgtattattaatgattggtatgttaggtttgttttaaaaaaataaaagattaaagtttttgttatggtatttataatatgtagtgattaagaggtaatatttttgtataatgttttaaggttagtgaatgttatattgaaattaattaattttaaaaaatgtgtaaaataaaaaaaaaaagatattgttgttttattaataagttgagtatatttgaatttttgatatttgtgtttaatgaattaggagatttggatttaaaataagataaattattttttttttttatttttttaatatgtaaggattataatatatagaatattataatttagaaataatttttatgtgaattattattttatttgagtattataatattatgaattagttattattattattttttttttataaatgaagaaatgttgtagaaattaagaaattaatagatgtgtttttttatttgtttattatttgttttttaaggttattttgtttagtggtatagatgcgaatataggtattgtgattttaaagtttatttttttttattaaatttaatattaaaatttaggagatagtatttattaagatgaaaaatattagttttgttattataagaatgatttatatatgtatggtattaagagtttatatagtataaatataaaattgtttgtgtattaggttttagttgtgaaggtaggtgtgtaattattattagtttaattaggaataaagagaatgacgatttataaggttaagtgatttttttaaggttaaagaagtggtggtattcgaaggtcgggcgtagtggtttatatttataattttagtattttggaaggttgaggtgggcggattatttgaggttaggagttcgaaattagtttggttaatatggtgaaatttcgtttttattaaaaataaaaaattagtcgggtatggtggcgggcgtttgtaattttagttatttaggaggttgaggtgggagaatcgtttgaatttaggaggcggaggttatagtgggtcgagatcgcgttattgtatttcggtttgggtgatagagtaagattttattttaaaaaataaaaaaaaaaaataaagcgaaattattttttttagtttttttttttttttttttttttttaatatatttttgtttaggtataggtataaagaagatatttaaatttaattataattaaaatttgttagttaagttaaaattggaagggaaataagtgagttgatggtaatttttttttttttttttgagatagtttcgttttgtcgttagtttggagtgtagtggcgtaattttagttttttgcgatttttgttttttaggtttaagcgatttttttgttttagatttatgagtagttgggattataaagtgagttatcgtgtttagttttttttaggtaaatttttagaatttgtggattattattagtaggtaaaattagtaagggtgttgtaataatttttagtacgtaagttgtttgtgttagagacgtttaaattagagcgattttatttcgtatagaggttgggtaaaatgaggttgagatttattgggttgtatttttagatgattaggtattttaagttataggatgagataggaggttagtataagatacgtgttataaagattttgttgataaaataggttgtagtaaagtagttagttaaaatttattaaaattacgatggttacgatagtgatttttggttgtttttaatgttagatttttattagtattatgatagtttataaatgttatggcgatattaggaagttattttatatggtttaaaacggggaggtaagaataatttattttttgtttggtatattattaagaaataattataaaaatgggtaattnaag

SEQ ID NO: 169 - DNA, 5237 bp, Artificial Sequence
  chemically treated genomic DNA (Homo sapiens)
tagaaaaaggacgatttaatgaagattgaggagaattagttagtgaagaaggaaggaggaaaagtaagagggaatttgttagtaaaggaggaggggattaggtgaatttaatgggtagaattgttgtttttaaacgttagtgtatattagttattaggaaggtttgttaaaatatagattgttaggttaggtgtagtggtttgtttgtaattttaggattttgggaggttaaggtgggtagattatttgaggttaggagtttaagattagtttggttaatatggtgaaattttgtttttattaaaaatataaaaattagttgggtatgatggtgggtgtttgtaattttagttatttaggaggttgaggcgggagaatcgtttgaattcgggaagtagaggttgtagtgagtcgaggttgtgttattgtattttagtttgggtaatagagtgagataaaaaaaaaatataaaaaaaaaaatagattgttaggttcgtttttagagtttttgattgagtaggtatattcgtttttcgagattgttgtataaattattataaatttggtggtttaaagtaataaaaatatattattttatagttttggatgttaaaagttcgaaattaaggtgttagtacgttattttttttaaaggtttagaggataatttttttttgattttttagtttttggtagtttttggtgttttattttttttttttttgtagggttttgttttgttatttaggttggagtgtagtggtgtaattacggtttattgtaatttcgattttttaggtttaagtagtttttttattttagttttttgagtagttgggattgtaggtatatattataaagtttagttaatttttttgttaatttttgtagatagggttttattatgttgtttaggttggtttcgaatttttgggtttatgtgatttttttgttttagttttttaaagtgttggaattataggtatgagttattttatttggtttataataatgttttgatatatatagtgtatgtagtaataggtattttatttgtagttgttaggatgtttaaggttagttgatttaataaataatcgtaaaattttagtagtttaatataataggttgttatttatataaagtttaaaatgttttatgtaagtttaaggataatttttagttttttgtagttagtgagtgaagggagaaagagtaaggattatggaggatattttaggttgagtttagaaatgggttgtgttttttttgtatttattttattggtttaagattagttatatggttttaattttattgtaaggagatttgggaaatgaagtttttttgtgtgtttaggaaagaagaaattaagttggtgagtattaaagttgtagtgagtcgtgattgtattattgtattttgttatttatttttcgatttttggttaattatgtatttatttttgaggagggattagtgggtgggaaggagggattggtgtattagttttttatggttgaaatagtaaattattatagatttattatttagaataatagaaatgtatttttatatggttttgtaggttagaagtttaaaattaaggtgttattagggttatattttttttagaggttttgagagaaaattagttttttgtattttttattttttggtggttttaggagttttttggtttgtggttgtagaattttaatttttgtgtttattattatatggtgttttttttttttgtgtttttttttttgtgtgttttttagaaggatatttgttagtcgggtgcggtggtttacgtttgtaattttagaattttgggaagttgaagtgggtggattacgaggttaggaatttaagattagtttggttaagatggtgaaattttatttttattaaaaatattaaaattagttgggtgtgttggtaggcgtttgtttgtaattatatttattcgggaggttgaggtagagaattgtttgaatttgggaggcggaggttgtagtgagtcgagattatattatagtattttagtttgggtgatagagcgaggttttgttttaaaaataaaaataaaaaatagatatttgttattagatttaggggttatatagataatgtagtattttgagattttgaatgtaattatattcgtaaaatttttttttttaaataaggttattataagttttggggattaggatatagatatatttttttggagaacgttatgtaatttattataattagttataattatttttgtagaaaatgatgggaatttgatttaggatggtggttttggaaagaagtggttgggtttgtaatgtattttaatggtagagtagagaggcgttggtggtggttagaaatagaagttgaggggttgggcgtagtggtttatatttgtaatgttagtattttgggaggttaaggtagttggattatttgaggttaggagtttaatattagtttggttaatatggtgaaattttgtttgtattaaaaatataaaaattagttaggtatggtggtgtatgtttgtaattttagttattttggaggttgagataggagaattgtttgaacgtaggaggtagaggttgtagtgagttataatcgtgttattgtattttagtttggttaatagagtgagattttattttaaaataaataaataataataataataaaaatttgggtgtggtggtttatgtttgtaattttagtatttggggaggtcgaggtgagcggattatttgaggttaggagttcgaggttagtttggttaatatggtgaaatttcgtttttattaaaaatataaaaattagtcgggcgtagtgggttatgtttgtaattttagttatttgggagaatgaggtaggagaatcgtttgaatttaggaggcggaggttgtagttagttgattgtattattgtattttagtttgggcgaagagtgagattttgttttaataattattaaaaaaataaaagttgagggatgaggtaggtggtgatttagcgtttggatatagaattgtgtggtttaggattgggttttaaaaagatttttttggggttatgtgggggatagattggagggagaaattagaagttagggagaagtttaaagttagggtttaggtaggagagtaggagtttagagtttgtttgagtttttaggatagagaagaggggtggagtggagatttagtaggtaggagggatttggttaagagattgatgcgttgttggggaagaggggataagatggagttttgattttatgattagatagatggtggggttgttttagatgaggaaattaggtgagagaatttggggatattagaggaaattgtagaggttattgggtgtgtatttgtaattaggtattgtagatttagatttgattgttaggattttaggtttagtgtttttttttttggggttttcgtttttcgggttttattgtagaggtaggaagtatcgtttgatgtttagttttcgttgggggtgttggtacggtttagcgttttttttatttttagggatttttttatttcgagtttgtagtatttttatttttttaggtatttagtttttgtttttagtatttgggtgttttttggtttagaataggttgtagattttgagaggtataaaaataagtggggaagggggagatagagaaaagaagataggttgggtatagtggtttacgtttataattttagtattttaggaggttaaggtaggaggattatttgagtttagaaatttgagattagtttaggtaatatagtgagatttttatttttataaaaaatgaagaaaattagttaggtatggtggtgtgtatttgtagttttagttatttgggaggttgaggtgtaaggattgttcgagtttgggaaggttggggttgtagtgagttatgatcgtattattgtattttagtttgggcgattttgttttaaaaataaaaataaaagagagatgaagagagaaaggaggaaggatttaaagaaggggttagaagtagagagaggttaggtatagtggtttacgtttgtaattttaatattttgggaggttaaggtaggagggtcgtttgagtttaggagttttagattagtttgggtaatttagtgagattttatttttgtttttttttaattaaatataaaaaatataatatttttattttatagtaagattttatttttataaaaaatataaaaattagttaggtatggtagtgtgtatttgtaattttagttatttagaaggtagaggtgggaggatagtttgagtttaggttatagtgagttgttttttttatcgtattttagtttgggtgaaaagtgagattttgttttaaaaagaaataaatatataaataaaataaagaaatatagagagagggaggatagagattttaggaggtaggaggatagagatttagaggagggagagattttgttgagataaggggatagagatggggagtagtaggaaggtggggataaagatttagagaggaggaataagagatttagggtaggaaatgggagatatagttggatgtagagatgggagagtttagtaggttatgaggttagagtgtttgtgaggttagttgttgtttagggttagttttgaggtttttatgtttagaggtgggttttagtagattaggggtttttttagattttttagcgtttgagatatggagatttgggagggattgttttatgagtttttggtgtttataaattttaaggttttttaggtattagagtatgtgttttagtggagtaggtgagggagatagggatagagagagagatagaaagttattttatatgaagcgggagtgggtggagttttatttttggaatttttttttttggggtttttttttttttttttagtttttcgttttttttttttttttagtttttttttttttttttgttttttttattgttagtattttttttgtgtggtgagtggatcgtttattttattaggtgaagatgttagtttaggagagttgttttagttttattaagtatttttttttcgtttttaattttttttttttcgtgagttgttttatggttatttagtcggggtttagtttttgtcgttaatttagtttttatttttttttgtggtttattttcgtattcgtattttttttttttagg

SEQ ID NO: 170 - DNA, 5237 bp, Artificial Sequence
  chemically treated genomic DNA (Homo sapiens)
tttggggagaggagatgcggatacgggggtgggttataggggaagatgagggttgggttagcggtaggggttgggtttcggttgggtagttatgaggtaatttacgaagaagaagaggttgaaaacgaagaggaagtatttgatgaggttgaggtagtttttttgggttgatatttttatttagtggggtaagcggtttatttattatatagaagaggtgttgatagtgggggagatagggagaaagaaagaggttgagagagaaagagagacggagagttgagagagaaaggaagaattttaaaagaggaagttttaggggtggggttttatttattttcgttttatgtaaggtggttttttgtttttttttttgtttttgttttttttatttgttttattgggatatatgttttggtatttgaggggttttggaatttgtgggtattaaggatttatggggtagttttttttaggtttttatgttttaggcgttgggggatttaaagggatttttgatttattggaatttatttttgggtatggggattttagggttgattttggatagtagttgattttatagatattttgattttatggtttgttaagtttttttatttttgtatttagttgtgttttttattttttgttttgggttttttgttttttttttttgggtttttgtttttatttttttgttattttttatttttgtttttttattttagtagagttttttttttttttgggtttttgtttttttgttttttggggtttttattttttttttttttgtgtttttttattttatttatatatttgtttttttttgagatagggttttattttttatttaggttggagtacggtggggaaaatagtttattgtagtttgggtttaagttatttttttatttttgttttttgagtagttgggattataggtgtatattattatgtttggttaatttttgtattttttgtagaaatggggttttgttatggagtgggagtgttgtattttttatatttaattaaaaaaaaatagagatagggttttattaggttgtttaggttggtttggaatttttggatttaagcgatttttttgttttggttttttaaagtgttgggattataggcgtgagttattgtgtttggtttttttttgtttttggttttttttttgggtttttttttttttttttttttattttttttttgtttttgtttttgagatagggtcgtttaggttggaatgtagtagtgcgattatagtttattgtagttttaatttttttaggttcgagtaatttttgtattttagttttttaagtagttgggattataggtgtatattattatgtttggttaattttttttattttttgtagagatgggagttttattgtgttgtttaggttggttttaaatttttgggtttaagtgatttttttgttttggttttttaaagtgttgggattatgggcgtgagttattgtgtttagtttgtttttttttttttgttttttttttttttatttgtttttgtgttttttagagtttgtagtttgttttggattagggagtatttaggtgttgggggtaggggttgggtatttggggaagtgaaagtgttataggttcgaggtgggaaggtttttgggagtggggagggcgttgggtcgtgttaatatttttagcggaagttgagtattaggcggtattttttgtttttgtagtggggttcgaggagcggaggttttagaggaggaggtattgagtttgggattttgatagttagatttgggtttgtagtgtttggttgtaggtgtatatttagtggtttttgtagttttttttgatgtttttaaatttttttatttggtttttttatttgaggtagttttattatttatttagttatgaggttaaagttttattttgtttttttttttttaatagcgtattagttttttagttagattttttttgtttgttgagtttttattttattttttttttttgttttgagggtttaggtaggttttgggtttttgtttttttatttggattttgattttaggtttttttttggtttttagtttttttttttagtttgttttttatatagttttagaggggtttttttgaaatttagttttgagttatatagttttgtatttaaacgttgagttattatttgttttattttttagtttttatttttttggtggttgttgagatagagttttatttttcgtttaggttggagtatagtggtgtaattagttgattgtaattttcgttttttgggtttaagcgatttttttgttttatttttttaagtagttgggattataggtatgatttattacgttcggttaatttttgtatttttggtagagacggggttttattatgttggttaggttgatttcgaatttttgattttaagtgattcgtttatttcggtttttttaagtgttgggattataggtatgagttattatatttaggtttttgttgttgttgttgtttgtttgttttgagatggagttttattttgttgattaggttggagtgtagtggtacgattatggtttattgtaatttttgttttttgcgtttaagtaatttttttgttttagtttttagagtagttgggattataggtatgtattattatatttgattaatttttgtatttttagtatagatagggttttattatgttggttaggttggtgttgaatttttgattttaagtgatttaattgttttggttttttaaagtgttgatattataggtgtaagttattgcgtttagttttttagtttttgtttttaattattattaacgtttttttgttttattattaaagtatattgtaaatttagttatttttttttaaggttattattttaagttaggtttttattattttttataaaaataattatagttgattatagtgggttgtatggcgttttttaaaaagatatgtttatgttttaatttttagaatttgtggtgattttatttggaaaaaagggttttgcgggtataattatatttaggattttaagatattgtattatttgtgtgatttttaaatttgatgataagtgtttgttttttgtttttgtttttgagatagagtttcgttttgttatttaggttggagtgttgtggtgtgatttcggtttattgtaattttcgttttttaggtttaagtaattttttgttttagtttttcgagtaaatgtgattataggtaggcgtttgttagtatatttagttgattttagtatttttagtagagatggggttttattattttggttaggttggttttgaatttttgatttcgtgatttatttattttagttttttaaagttttgggattataggcgtgagttatcgtattcggttgataagtgtttttttaagaaatatatagaggagaagatatagaagaggagagtattatgtgatggtagatatagaaattggagttttatagttataagttaaggaatttttggagttattaggagatggaagatgtaaagaattgatttttttttagagtttttggagggagtgtggttttggtgatattttgattttggatttttggtttatagaattatgtgagaatatatttttgttgttttaagtagtaagtttgtggtaatttgttattttagttataggagattaatatattaattttttttttttatttattgatttttttttagagatgagtatatgattaattagaagtcgaagggtaggtggtagagtgtagtggtgtaattacggtttattgtagttttgatgtttattaatttggtttttttttttttaggtatataggaggattttattttttaggtttttttgtagtgaagttgaggttatgtgattggttttgggttaatggaatgggtgtagaagggatatagtttatttttagatttagtttgaaatgttttttataatttttattttttttttttttatttattggttgtaggaagttgagaattatttttggatttatataaagtattttggattttatgtaagtaataatttgttgtattaagttattaagattttacggttgtttgttaaattagttaattttaaatattttaataattataaatagaatatttgttattgtatatattatatatattaaaatattattatgggttaggtgaggtggtttatgtttgtaattttagtattttgggaggttgaggtaggaggattatatgagtttaggagttcgagattagtttgggtaatatagtgagattttgtttataaaaattaataaaaaaattagttgggttttgtggtatgtatttatagttttagttatttaggaggttgaggtgggaggattgtttgagtttgggagatcgaagttgtagtgagtcgtgattgtattattgtattttagtttggatgatagagtaagattttataggggaaaaaaaagtggaatattaggagttattagaaattgaagagttaaggaaggattgttttttgagtttttgaaggaagtggcgtgttgatattttaatttcggatttttggtatttagaattgtgagataatatatttttgttgttttaagttattaagtttgtagtaatttatatagtagtttcgggaagcgaatatatttgtttaattagaaattttgggggcgggtttggtaatttgtttttttttttgtgttttttttttgttttattttattgtttaggttggagtgtaatggtataatttcggtttattgtaatttttgtttttcgggtttaagcgattttttcgttttagttttttgagtagttgggattatagatatttattattatgtttagttaatttttgtatttttagtagagatagggttttattatgttggttaggttggttttgaatttttgattttaggtgatttgtttattttggttttttaaagttttgggattataggtaagttattgtatttggtttggtagtttgtgttttaataagtttttttggtgattgatgtgtattaacgtttgagaatagtaattttatttattgaatttatttgattttttttttttttattggtaaatttttttttgttttttttttttttttttttattggttggttttttttaatttttattggatcgtttttttttta

SEQ ID NO: 171 - DNA, 2880 bp, Artificial Sequence
  chemically treated genomic DNA (Homo sapiens)
gattagtttttgtattttgagagtagattatttggtttttttttgttttttattagcgaagttggatatattttttttatatttttttaattatatgttatatattggtttttttttttttttttagtttttaaatatattaagatgtttgtattggatgaagttgacgaaatgttaagtcgtggatttaaggattagatttatgatatattttaaaagtttaatagtaatatttaggtgagggtagttttgtttgaatagttaatgatttttgaaaaatagtaagtgttaggggaattatatattggatttttgagtttttttatgtatttgttttagttttaggtgtggttagggaagggagtaggttttaggaaggaattagtattttaagattggtttttttttttattaggtagttttgttgttagttataatgttttttgatgtgtttgaggtgattaagaagtttatgagggattttattcggatttttgttaagaaggaagagttgattttggagggtattcgttagttttatattaacgtggaacgagaggtggggtttagtgtaggaggcgggtttggtagtgagttgttgggtatagtttttgattgatttttgttttttaatttttaggagtggaagttggatatattatgtgatttgtatgaaattttgattattatttaggtagttatttttattaatattcggaggaaggtggattggtttatcgagaagatgtatgttcgagattttattgtattcgttatggtgtgtttgttcgttgttagtttgttgtgggtttgttcgttagaagtgttttatttgaagttagggtttttggaatttaggtgtttatttggtttgttgtatatttgtttttttttttagtatggagatatggattaaaaggaacgagacgtgattatgagggagtttcgttttggttttagtagagttttgattattattgatttgttggtgagtagagggaattgatagtaaaggtagaagggaggatttaaggtgattttttttttaaggggatattagtgttttttaggaaagtagtagtttggaatagaatttggtatgtttaaggtttttggggaattgggatgtttattttttttgttttttttggttgtttatatggatgtttaagtgtttttttttcgggatagagtgtttttcgtgtatatgttgaagagttgttttttttgacgtaggttagaggtattgatgtgtagtaggtttttttagttattaattatgatttttttattaatagggaaaattatatttataggtaagcgtagatttggaatatttttttatttttttatatttggttttttttgggtttaaagtttttgatattttttatttttttttttgttttttagaatcggtcgaggtggacggtttggtcgtaaaggtgtggttattaatatggtgatagaagaagataagaggatttttcgagatattgagattttttataatatttttattgaggaaatgttttttaatgttgttgattttatttgaggggttgttttgttatttagttttagttagggtttaatttttgggggttgaggagtagtaggaggggggagggaagggagttaagggatggatattttgttattttttttttttgaataaatgttattttttgaggtaaaagaaggaatcgtgaatattttagatatttttttttttggggtaggtttttgttttaggcgtcggttttttttttaaaaaaaaaaaaaaaatattaatttatttttttaatttagtaatttttagattttagaggttttttttattttagttgagtttttttgaaagtgatttaagggattatgttatttagttttatttgttggattaaatttggagggagaatttttaaaatttttaagtgaggttgtttagggggttgtttttaggtggggggaagtaggggagagaaaatggtagttatttttatattgttttgtatagtatttattgatttaggaaataaataaaattttgaataaaatgatttggaaattgtttgtttgggttttttattttttattttttttttttttttttatttgttattgggtgtatttttgttttttttttttttagtagatggttatttttgggttgttgtttttttgttattatttgagtttttagacgttggaaagttatgttttcggttttgtgaatgataatgttgattggagtgttgtttttttgtaaagggttgggtgtggatggttataagttttttatatgttttagttaagaggaagtagtataggggttagtttagaggtttaggggaaaggagtggaaatcgatttttttattaagggaggggtttgtattttagttgtttttatagttatttgttataattgttaagtaagtttcgttgagtttgatatatggatttttgtggattaattgttttaggatttcgtttgtatttatgtgatattgttgattttgttttgatgaagtagggttaatagttttttaatttaattataaaaattaatgattaagagagaggtggttagagttgaggtttttgagttaggttgtgggtgggattatttttagtataggaagtgagatttttatttttttttttttaagagagggttgagggagtagggttgagtaattggtgtagatagtttagttggattttgggtgaggcggtttagttatgaggttggttgtgtttttttcgggggttttgttggggttattggtaggtaaggaggaaggaggttgaggggagggggtttttgggagggagtttgttttgggttgttaattattttttttttgttaaaagt

SEQ ID NO: 172 - DNA, 2880 bp, Artificial Sequence
  chemically treated genomic DNA (Homo sapiens)
gtttttggtagagaggagatggttagtaatttagggtaggtttttttttaggggttttttttttttagttttttttttttttatttgttagtagttttagtagggttttcgagaaaagtatagttagttttatggttgaatcgttttatttaaagtttagttaggttgtttgtattagttgtttaattttgtttttttagtttttttttggaaaggaggaaatgaaagttttattttttgtattggagatgattttatttatagtttgatttaggggttttagttttagttattttttttttagttattagtttttgtaattaagttaggggattgttggttttgttttattagggtaaagttaatagtgttatatgggtgtaaacggagttttagggtagttgatttatagggatttatgtgttaaatttagcgaaatttgtttggtagttgtggtaagtagttatgggaatagttgaggtataggttttttttttggtggggaaatcggtttttattttttttttttggatttttgggttgatttttgtattatttttttttggttgaggtatgtgaggggtttgtgattatttatatttagttttttatagaggggtagtattttagttagtattgttatttatagagtcgagaatatggttttttagcgtttgagaatttagatggtgataagaaagtaatagtttaaaggtaattatttgttggggaaggggggagtagagatgtatttagtagtaggtgggagagggaaggggaggtaagaaatgagaagtttaaataggtagtttttaagttattttatttagaattttgtttgttttttgaattaataaatattatataaaataatgtaaaaatggttattatttttttttttttgtttttttttatttggggataattttttgggtaattttatttaggggttttaggggttttttttttagatttggtttagtaaatgaggttgagtgatatagttttttgaattatttttaaaggagtttagttgaggtgaggagagtttttgggatttggaggttattaggttagggaaatggattagtgttttttttttttttttgggagaagagtcggcgtttggggtaagagtttattttaaagaaaagggtgtttaaaatgtttacggtttttttttttgttttaaaaagtgatatttatttaaagaaaaaaaatgataagatgtttattttttggtttttttttttttttttttttgttgttttttagtttttagagattgagttttggttggggttgggtggtaggatagttttttagatgaggttagtaatattgaggggtatttttttaatggaggtgttgtagaaggttttaatgtttcgaagagtttttttgtttttttttgttattatgttaatagttatatttttacggttaaatcgtttatttcgatcgattttggaaaataaggaaggggatgaggaatattaggagttttaagtttagggagggttaggtgtgaaggggtaggggagtgttttagatttacgtttatttgtggatatagttttttttgttggtgggaaggttatagttgatgattaaagaaatttgttgtatattaatgtttttggtttacgttaagaaagataattttttagtatgtgtacggaggatattttatttcggagggaagatatttaggtatttatgtgggtagttaaggaaggtagaggaaataagtattttagttttttaaaggttttaggtatgttagattttattttaagttgttatttttttgagaggtattgatgtttttttggagagggaattattttggatttttttttttgtttttgttattagttttttttatttattagtaggttagtggtaattaaaattttgttagagttagaacgaaatttttttataattacgtttcgttttttttggtttatatttttatgttggaagagaaaataaatatgtagtagattaggtaggtatttgggttttaggaattttggttttaagtaggatatttttgacgggtagatttataataggttggtagcgggtaaatatattatggcggatatagtgaaatttcgagtatgtattttttcggtgagttagtttattttttttcgggtgttgatgaagatgattgtttgggtgatggttagggttttatataagttatatagtgtgtttagtttttatttttggaggttgggggataaaaattagttaggggttatatttaataatttattattaggttcgttttttgtattgggttttatttttcgttttacgttgatgtagaattggcggatattttttagggttaattttttttttttgataagaattcgaatggggttttttatgaattttttggttattttaagtatattagaaggtattgtggttgatagtaaaattatttagtggaaaaaaaggttagttttagagtgttggtttttttttgaggtttgtttttttttttagttatatttaaaattgaagtagatgtataaaaaggtttaagaatttagtatatggtttttttggtatttattattttttaagaattattagttatttaagtaagattgtttttatttgggtgttgttgttgagtttttggaatatgttatagatttggtttttgaatttacggtttaatatttcgttagttttatttagtataaatattttgatgtatttgggggttagagaagaaaaaaaaagttaatatatagtatatgattagggaaatgtgggagagatatatttaatttcgttgataaaaaatagagaggagttaagtagtttgtttttagagtataaagattgatt

SEQ ID NO: 173 - DNA, 5544 bp, Artificial Sequence
  chemically treated genomic DNA (Homo sapiens)
tgttttatgtttttgttaggtaaaatgatttttttttaggtatggtttaggcggttgttatttttattttgttttatttattgatgatatttttttagtttttttattgttatgtgagaatttttttttttttttataattagtttaatggagtttttaaaggtaaagagattagtgtatatgtttagtatggtattttaaattggaaatttttttatttgttttataaagaattggggatataatttaaggtatttatttgttgtttttaattattgttataatttgaggtgaattaagtttttagatgaatattttaaaggatattttagttttttattgttttgttaattatatttttaaggatttttattttttttttttattttagttatttatttttgtgattatattttaggtttcgttgtaatttgaattgaaattttaaatataatttgttgttatttggtaaaaattttttttattttttattttattattagttattattaggatttatattttgaatttattaaaatgtttagttttttagtttatgtattttttttttttatttttaattttttttagttttagttggattatatatgttaattattgtgttaatatatatttttttttgagagttttaaatataggttaaattgtgttataatgtaagattatttgggtttattttatttttattatttaaaagttatgggattttggggaagttatttagattttgtgtgtatttatgtttttatttgtaaaatgaggataataatagtacgaatgttttggggataaaaggagatagtacgtgtaagtgttgagaaaaaaacgttatgattaataagagtatttaatagatatgaattagtagtagtaatattttttaatttaaaaatgttagtgaaaaaataatatgtgttaataagttatgttagtttataggtgtttatatattttatttatattatttaaatagtttttttgttggttaattatttttaaaaagatgtagtatttttttatttaaatgataatgaagtattgatttattttttgagtttttgtgtttttagtatttaaagaaatgggttgtgtttttgttttgttttttttttaattttattttgatagttaattttttgggtttttaaggagtatttgttttaattatgataggataatgaaatattgatatttaattataatatttatgaaggtagtagatgttaattataaattaggaggtatgtggttttatatttttttttatgtaataattgtggttttagaaaagagattagatttaaaaaatagtttgagttatattattttttattgatgttatattatgttattttttttagatttataattatgtgatagttattttgagttttgaagattttaggattttttttagtttggaatttaaaaatttttttgacgatgggtattttgttgaatttttttatttaagtaagtttttggaggaagagtttttaatttaggtattatataaataattatcggattaatagatttcgattaaaaaaaaattgtaaataaattaatattttgaatatagtttttgtagagtgaaattgtgtttttttgagatatgtgtaataaagtattttgaggatgtgaatattattaatattttagttttaattattttatttttataattttaagtgttttttaatagtaaattagtgaaatgttaattataattttaaaaaaaatttattattttggaataaaattttaggaagtattataaagaagtaatgtaaggtggtaatattgggttttgttaaaattttgggtaagttatttagtttttttaggttgttttttaattattaaaatgagttttggtatggattagatgaaataatgtattaaaattattttgtagataatagtaaataataaatgtttattgaatttgaggaattaaatgggtaggatgttaggagttgttaggttttttagaagtaaatttttattttaaagagtataaaattaggtttatgtttattgtatttgtatttttattttttttgtaatttgtttttaaataatttgttatggtttttggttaataaatatattttttttttatttttttattataaaataaaaagataatatttttatgtttttagtatggttttatttttagattttagaaatatatagttggatgtgttttttgggaaaatatataaattaaaattatttttggtaggtaaatattggttattaataaatagttttagtaagtttttttttttataatttaaggatttatgttatagtttatttatttagtgggtttattagaatgtagttatattttaaagttagttttataaggtttttttttggaaagaatttagttgatgagtttttatttttttaattgttgtttttatatttttatatgataaattattattttttttggttttgtagtattttaatagatttagagttgttttttgagaaaagttttagtattaataaaggttagaattaataaaggttgaattaaggatgatatgtatgtggtatgtgttttttttagttttttttttaggtttatgaagaaattattaattagtgagaatattttttttatagaatataaatttagttttaggttatttttgaataagagttttaggaagtaaaaggaaataagtatgtaagaatattaagaatatatttgttatatttatattagaatgtaagttttttaagggtatagattgtgtttgatttatttttgtttttttaataaaaatgttgatggggtgttaattaattgtataaagtaggaataagagttagtttcgtaaatgttttttaaaagttgataaaagtatttttattttgattttaaaattaaaaaaagttaataaagatattataatattttaaaaatttaaattttatgagagtttttgtttggatgaaaattagaatatatttatattattttaaacgaatgaatatgtgtgattttataaaaataatatttttttaaattatgaatttagatggaaaaattcgatatttttatttttgtagttagttttattttttttaaaatagtttaaattagtaagaattttttagaagttatagtttgatttatttaattttttaaggaaaaaataaaaaaatttaaatagatattgttttatttttattattttttatttttattaatagtggtaatttaagtgtattttaaagtattttaatttttttatagagtttattaaatgagtattttgtggatatttatatatagttatagaattttaagtggtgtttagattagttatatgttagtgtatttttaattgttagagttaatatgtttttagtatggttttttaattatattttaataatttattatagtttttttttataatgtaaagttttggaaattatttattaaaaagtgtttgtgtattttggggttttggtaggttagggtagaatttttgagaatacggtgtgttttagagaagataattaatttgagaggatttatatagaaatagtttatttaggatttggttgttggtttttatttgagatttgaggattttataattatttggagatatttataagtgtatagtatattttggatattatttttaatgattattttattttgtaaagaggtgattttattaatagtaaaggagagggtttagttttagttattaggaatatagttttttgttagtaagtgtttaatgatttattttttttaatagaatttttataaggttggaatttagggagggatgtttggagaatgtttgaaaggaagtttataagttattgttttgttttttgttggagaaagtgtttcgtggtagttagagaagttgattaaggtaaatagtaatatgttttggtaatatttttttattattttttatgtataatttaagaaaggttgttatgaagtgttttaattaggttgggaatattataaatttcgaaaaaagaaaattattagtggaaaaattaaggatatagtagatttaataattgtgtttacgtggaattataaaatttatttaagtgaattgtattaaaatagatagaatattttaagaaattgttgtatgtgtattttttttaatttagttaattattttattaatttgttaagatgattaatttttttggaattatgtagatttagttaaaatgaaattatatataagatttatttttttttttagatgtttttttatttatttttaaatttttataattattagatgttttttttttttagaagatattttgagaggaaagtaaaaatattatttttgtaaagttatttttatttttttaaaggtttgttggtaaattatttttattgatttttttatttttttagtttgtgtatatatatttaatttatattaaattttattagatggtattttatttttttaaagtaaagtagtcgtgggtttagatagttgaatttttaaatttttgtatttattgaaagtgtatatggtgttatatggataaagaaattgtgttgaaagaaaaatatttttgtttgtaatattttataattttttagaggaaaaaaaagtgtagttatatggtatattttttataaaattttatgtggttttaatgttttttttttgttaaaaagtagatatatgtttaatgtatagatttgtaagttttattattttaaatttattttttagtggtaaataaaaatgttatgtaaaatttaatgatttgttaaagtgattttttagtgaattttagaagaaaatgtaatataaatttgaattggtaaaaaagaaaaaataaaaatttttgtatgttaacgtaagtagatgttggtgtagttataaggatgagaaggttataaaattttttttgagttatttatagtttatttgagggttaagaacgtttttaaaatttgtttttaattttatagaaattttttgaaatttggtacggtatttaaaagttcgtggaaagaaaaaaattttgttttggttttagtttttaattataaagatagatttggttttttttaacggtttttatagatttagtgatttacgttttgaagatagaattagttaatttttaaaaatatttggaaaaatgaaggttagtataagtaattttaagtatttttaaaaaattagggttggttggattgaacgtgattagagttttttattgtttagaaggtgaagatttgtatataagtatttatttttttaatgggttgggattggaaaattgttttaaatatattgtagaaatatttgtttttgtagagttggaagaattttagtaattatagtcggattagtggaaaataattaaaagttttgtggggcgagagaaaaaggatttaggtgtaaataaaattttgttatttttattatttagtaggaattgtgtgtatgtttaattttttttattttatgtaga

SEQ ID NO: 174 - DNA, 5544 bp, Artificial Sequence
  chemically treated genomic DNA (Homo sapiens)
tttatataaaataaagagaattaggtatatatatagtttttgttaaatagtagaaatggtaagattttgtttatatttaaattttttttttttcgttttataaagtttttgattgttttttattgattcggttataattgttggaatttttttagttttgtaaggataaatgtttttatagtatatttagaataattttttaattttaatttattgaggaagtaaatatttatgtataaatttttattttttaaataatagaaaattttgattacgtttaatttagttaattttaattttttaagaatatttgaggttgtttatattaatttttatttttttagatgtttttgaaagttagttaattttgtttttagagcgtgggttattggatttgtgaaaatcgttgaaaaggattaagtttgtttttgtagttggaagttgaagttaggataaggtttttttttttttacggatttttgaatatcgtgttaagttttaaaagatttttgtaaaattagaaatagattttgggggcgtttttggtttttaaatgaattgtgagtgatttaagggaagttttatagtttttttatttttgtaattatattaatatttgtttacgttgatatatagaggtttttatttttttttttttattagtttaggtttatgttgtatttttttttagaatttattgaaggattattttagtaagttattgggttttgtataatatttttatttgttattaaaagatgaatttaaaataatgaaatttgtaggtttgtatattaaatatatatttattttttaatagaggaagaatattgaagttatataagattttgtgagaaatgtgttatataattgtattttttttttttttggaagattatgaggtattgtagatagaaatgttttttttttagtataatttttttgtttatatagtattatatgtatttttagtaaatatagaagtttaaaaatttaattgtttaaatttacggttgttttattttaaagaaataaaatgttatttggtgaaatttagtatgggttaggtgtgtatgtataggttagaaagatggaaagattagtaagaataatttattagtagatttttggaagaatggaaatggttttataagagtggtatttttgttttttttttagaatattttttgagagaggagaatatttagtaattataaagatttaaaaataaataaaaaagtatttgaaaagaaaagtaaattttatgtataattttattttggttaaatttatataattttaaagaaattggttattttgatagattagtaaaatggttgattgaattaaaaaaaatatatatataatagttttttggagtgttttgtttgttttaatgtaatttatttggatagattttgtggttttacgtaaatatagttgttaaatttattgtgtttttaatttttttattaatggtttttttttttcgaagtttataatgtttttaatttgattaaaatattttatggtaattttttttggattgtatatgaaaggtaatggggaaatgttattaaaatatgttgttgtttgttttagttaatttttttggttattacgggatattttttttagtaaagagtaggatagtggtttgtgaatttttttttagatattttttagatatttttttttgaattttagttttatgaaaattttgttgaggaaaatgagttattaggtatttattggtagagaattgtatttttggtggttggggttgggtttttttttttgttgttggtggagttatttttttataaaatgaagtaattattaagagtaatatttaaggtgtgttatatatttgtaggtatttttaagtgattgtgaaatttttagattttagataaaagttagtagttaggttttgaatgaattgtttttgtgtaagtttttttagattgattgttttttttggaatatatcgtgtttttagaagttttgttttagtttgttaaagttttagagtatataggtattttttagtgggtgatttttaagattttatattgtagagagaaattataataaattattagggtgtaattaaaagattatgttgagagtatgttagttttagtaattaagaatgtattgatatgtgattggtttgagtattatttaggattttatgattgtgtgtgggtgtttataagatatttatttaataggttttatgaagaggttggagtgttttaagatatatttaagttgttattattagtaagggtgggaaatgatgagagtgaaataatgtttgtttaagtttttttgttttttttttggaaggttgggtgagttaagttgtaatttttggaaaatttttattagtttgaattgttttaagaaaaatgagattgattgtagaaataaagatgtcgagtttttttatttgaatttatggtttagggaggtattgtttttataaagttatatatgtttattcgtttgagataatgtgaatgtattttaatttttatttagataagaatttttataaaatttggatttttaaaatattgtaatatttttattagttttttttaattttggaattaaaatgaaaatatttttgttaatttttaaaaaatatttacgaaattgatttttatttttattttatataattagttaatattttattaatatttttgttgagaaaataaaaatgaattagatatagtttgtgtttttaaggaatttatattttagtataagtatggtaggtatgtttttaatgtttttatatatttgtttttttttgttttttaaagtttttgtttagaaatagtttgaagttgagtttgtgttttgtagaaagagtgtttttattggttggtgatttttttatggatttgggaagaggattggaaagggtatatattatatgtatgttatttttagtttaatttttgttagttttaatttttgttagtattgagattttttttagaaagtaattttgggtttattaaaatgttgtaaaattagaaaggatgatgatttgttatgtaaaaatgtaagggtagtaattaggagagtagaggtttattaattgagttttttttagagagggattttgtaaggttgattttggaatatgattgtattttggtaagtttattggataagtgagttataatataaatttttaggttataaggaggagagtttattagaattatttattagtagttaatgtttatttgttaaaaatgattttaatttatatgtttttttagaaaatatatttagttatgtatttttagagtttgaaggtaagattatgttgagagtataaggatgttatttttttattttatggtggggagatgaaagagagatgtgtttattaattaaaagttatgataaattatttaaggataagttataaggggaataaggatataagtgtagtaaatataagtttgattttatattttttaaagtaaaaatttgtttttagagagtttaatagtttttaatattttatttatttgattttttagatttaataaatatttattgtttattgttatttataaagtgattttaatgtattattttatttgatttatattaaaatttattttgatgattaggaaatagtttagaaaaattggataatttgtttaagattttaataggatttagtgttattattttatattgtttttttgtgatattttttaaagttttattttaaagtgataaattttttttaaaattataattgatattttattgatttgttgttgggggatatttaaggttgtgagggtaaaataattaaggttaaaatattaatgatgtttatatttttaaagtattttgttatatatattttaaaagaatataattttattttataaggattgtgtttaaaatattaatttgtttatagtttttttttaatcggggtttattaattcgatgattatttatatagtgtttgggttaaaagttttttttttagggatttgtttaaatgaaaggatttaataaaatatttatcgttaaagagatttttgagttttaagttagaaagagttttgaggtttttaaagtttaaaataattattatatagttatagatttggaagaagtggtataatatagtattagtgggaaatgatatagtttaaattattttttgaatttgattttttttttaaaattataattgttatataaggaagaatataaagttatatgttttttagtttgtaattggtatttattatttttataaatgttataattagatgttagtgttttattattttattataattagggtaagtgttttttggagatttaaagggttaattattaaaatggggttagaaaagaaatagaatagagatataatttatttttttgagtgttgaggatataaagatttagaagataaattagtgttttattgttatttaaatagggaaatattatatttttttagaagtggttaattaataagaagattgtttaaatagtataaatagaatgtgtaagtatttatagattaatataatttgttaatatatattgtttttttattagtatttttagattagagaatattattattattagtttatgtttattgaatatttttattgattatgacgttttttttttagtatttgtacgtgttatttttttttatttttagaatattcgtattattattatttttattttatagatgaggatatggatgtatataaaatttaaataatttttttaaagttttataatttttgagtggtagggatgggataaatttagatagttttatattataatataatttaatttatgtttagggtttttagaggagggtatatattggtatagtgattggtatgtgtgatttagttggaattaggaggagttgaagatggaaggaaaaaatatatgggttaaaaaattggatattttgatgagtttaaagtatgagttttagtagtaattagtaataaggtgggaaataaaagaggtttttattagatagtagtaggttgtatttaagattttagtttaagttataacgaggtttaaggtatggttatagaagtaagtagttgagatagaagaaagaagtgaaggtttttagagatatagttggtaaagtagtgagaggttaagatattttttgggatgtttatttgggaatttaatttattttaaattatggtaataattaagggtagtagataaatgttttgagttatatttttaattttttataaaatagatggagagatttttagtttaagatgttatattgaatatatatattgatttttttgtttttggaaattttattaagttgattgtaaaggaggaaaaggatttttatatgataatgaagagattgaagaagtattattaatggataaagtagaatagaaatagtagtcgtttggattatatttagaaaggaattattttgtttggtagaagtatgaaata

SEQ ID NO: 175 - DNA, 23683 bp, Artificial Sequence
  chemically treated genomic DNA (Homo sapiens)
gtagtagtaataatttaataaagtatgtatgtaattgtttaattgtttaataatgtaattgtttaataaagtaattgtggagagtaattttgtatagtttatagaaaacgttaatgttaggtgagttgatagagtatgttgtttagtttgtagttattaaggttaatggaaaatttttagatttttttttgaagtgagagtataaaggaatggagggtatttggttgttattttcgttgggaaattggataagaggtttagttttttaaaagtttttattttataaagtaaatttatattttgtatggttaggtttgaaatagtatgttttttttttttagttggtgattttggagatacgttttttaggttaagtttttgtaaaatagtttattttggtaattaggaaattgagtttatttttgagtttagattatacgaataattaatatatgtttagcgttttatggttaggaaatgttgttttgagaagtttattaataggtttattagttattggtatttttgttttattgatttattaaaattatatagttgttcgggtttgggagttaaattttttttattagatgttaaattttacgttttttttattatattatggtgttataggttaaggaatatagtgtagggttttgaattttttttttgtaggatagtgttttttaagtttggttatttgataaattttttaagaggtgttggaaatgtagatttttgttttgtttttagattttgatttagagtgttattagtaaatttgtatttttaaatagttgtttggtggtttaatatatagttaggattgatagttattgtttagttaaattaaatattaatgttataatttttaatcgatattatttttagggtttggtttttaaagttggaaattagtgtgttttagattagtggttttttgttttttaaaatttattttatttttaaagaatttgttgaaatttgtggatttttttttaagaaatatataaatatatatatatatatttttatatataattttagagggttatattagttttttgtttttgttataataaatggttataagtatagcggtttaaaataataatatttattattttatagttttggatgttagaagtgggataggagttttattggattaaatttaaggtgttgtttttttggaggttttagragataatttattttattgttttttttattttttagaagttgtttgtattatttggtttatggtttttttttttatttttaaagttaataatgtggtatttttttgattttatttttattttatatttttttttcgtgttatagttaaggaaaggttttttgtttttaaggatttatataattagattgtgtttagttagataattttggaaaatttttttattttaagatttttaattttaattatatttgtagtttttttttgttatataaggtgatatatttataggttttagggattaggagggggattattagtttattaattataggggattttaggatttttgaagtaatatggaaaatgagtgaattttaggttaggagtatttgttttagattttatttattttagatgttaaattaataagaaattttgtttgtttatraataatagaatttttaaaagtagtggtttttataaattaggtgtttatttttttttaggtagtaagaagtttttaggaaggtattttatgttaggtgtagtagttttagtatgtgatagttgaagtttttgtaatttttttggttttttttttgaggtggtttttaaaatagttgttgtatttttagttatgatttttgtgttttatgtaagaggggtaagggtataggataaaagttataagttagttgagttgttttttttttaagaaattttttgagaagtttattatttaaataatatgtttataytttattggttagatattgtatatggttattttgtttgtaaaagagattgggaaatatagttttatttatttttaaagttaggtatattaatattttattaattttgggttttgttagtaaggaaaatgggaagtataaatattgggaagatattagtgttttttattatagatgaaaattttagttaggtatagtggtttatggttgtaattttagtattttgggaggttaaggtaggtggattatttgagtttaggagtttgatattagtttagataatatggtaaaatttcgtttttattaaaagtataaaaattagtcgggtatggtggtatatgtttgtggttttagttatttgggaggttgaggtgggaggattgttggagtttgggaggtcgaggttgtagtgaatagtgattgtattattgtattttaatttgggggataggagcgagatattgttttaaaaataataataaaattaaaaaaagaaaaataaaagaaaattttgtgttttgtgttttataacgagaattgattatttttttatttttatataattaaaatatgaagaagttaaagttttttttaaattttttttatagtgttttatttttttattaagtttgtttttttttaagtagtttatttttttttttttttattttttttgagatggatttttattttgttatttaggttggagtgtagtggtacgattttcggtttattgtaattttcgttttataggtaaaagtagtttttttgttttaattttttaagtagttgagataataggcgtgcggtatttcgtttggttaatttttttatttttaatagagatggggttttattatgttgattatggttggttaggttggtttcgaatttttgattttaggtgaatttgttcgttttggttttttaaagtgttgggattaaaggtatgagttatcgtgtttagttattttttttttttttttttttttttttttttttttttagatggagttttgtttagttatttaggttggaatgtagtggcgtattgtcggtttattgtaagttcgattttttagttttaagcgatttttttgttttagttttttaagtagttggaattataggtatgtgttattatgtttggttaattttttgtatttttagtagaaataaggttttattgtgttggttaggttggttttgaatttttgattttaatttatttattttagtttttttaaagtgttgtgattataggagtgagttattgcgtttagttagtttatttttttaataatgtttaagtatttatttaagtttggtattgagttgggttttgggggttataaagatatttaagatttttttttttttagagagttatatcgtttatggagagggatagagagtttttaaaatgatgaatatgttttaagtgttgagatagaggtatgtgaatattttttggtagtttagaaaagaaaggggaagaggaaatggtatagaaagggtgaggtaagaattggtttggaagtttaggatggataggattttgttagttgaagaggggtaggtatattttaggaagaaagaatagcgttggagaaggtatagatgtgtgtgaaaatttttgttggatacgtttaggggatagttagaagttgtgtgtggatatattgtagggtttgtgggaagtgagttaggaaaggggtataaaatggggttggaaagagagatggagtttttatgtgaagttatgttaaggagatcgggttttattttataggtaggagtaggtggtggggggtaacgggaagtttttaattattatttaaattttgttgtagaattaaaaagtggaaagaagagaatataggtagggaaattataatagtgtggttagattttaatatgatagtagttaatttagtaggaattttgaatttgagtagttaagtttatagagatagaaggtaggaaggtggttgttagagtgggggtggggatgggggtagggttagggggaaagaggagttattgtttagggtataaagtttgttttttaagatgaagagttgtggagatggatggtggtgaaggttgtataatatgtatatatttaatttttcgaattgtatagttataaatggttaagatggtaaattttttgttatgtatatttataattatatatatatatatatatatattttttagtgtacgtaaattttgttggattttaatttttagagttttcgatttagtagggttgagtgggatttgaggatttgtattttttgataagtttttagatgacgttgatgttgttggttcggagatatatttcgggaattattggtgtacgagattaagtgattagaatatggaggggtgttttgttcgtttttacgtggttattattgttatgaataataatagtcggcgtttattgagtattgtttttatagtttattttataattgggtgaaggagtagaggatgcgtagggttagaatttggagtttaaattcgttttttattcgggttgttttggattttattggttgtgagatagggagggaaagagagataaaggtagggagataggtttagtagggtyaagaagtttgttagtgacggaggggagtagttttattttcgggaattcgagcgtttcgtcggcgggaagggggtagttcggggcgttcggcggttttaggggttgattttcgttcggaagtgcgcgtagggtttacggcgtaagggcgtttgtcgcgtttagtcgtcgtcgttcgggtcgtttatttcgcggggcgtttttcgtagattagcgtcgttcgttcggattcgttcgcgtagatttttcgggcggattgaggatcgttcgttcggggtcgtttttgtgttcgtttttagcgttcgtttagttcgtcgttcgcgtttcggtggcgggttcgacgttcgtatttcgttcgtgtttaggcgtagagttttcgtttcggggagttttttggtcgtcggcgggtttcgcggttcgcgcgttgggcgttttgtttgtcgggtagaggggaaggcggcggtcggttggggatgggcggttcggttgcgtcgaggggcgtcgggaggtttcgcgcgttgttgttggcgttggtggtcgcggggattttcgcgggcgtttataattttgattcgtagcgtttcgtgtatttttagggtttcgttgattcgtttttcggttacgtagttttggagtatttttacgataatacgcgttggtgagtgttcgttcgatttcgcgattttggttcgcgcggttatcgtttcggtttttaggttagcgtcgtcgtcgttttttcggttttttttacgtcgtcgtttcgagggggcgatttaaatgtttttcgttgcgcgcggttcggtcgtcgggggacggcgggagaagggaggacgtcgttcggggttcgttaaggtcggggtcggcgtttggaggcgggcgggggcgttcgggtgtttttttggggttttagtttagagcgtggggggagagtcgttaaagttgtttttttcgtcgtttagttaaattcggttttattttttgaatcgaaaaktaatttggtttttttgttttcgggcggtcgtcgttggtttagcgagttttttgaatttcgtagggtttggaggagtcggggtattggagttgtattttttttcggttttgggaatttttgaggaaggagtatagtttttttagcgttgcgcggggtggggtttttaggggtagggtgtttgggatttattgggcgtattggagtttagagtttcggcgttttytttttttttagtttttataagattttgggtggaagtggagcggagaagtttttaggatatagggaagaggaaggtgagggagtattttttagtgamtcgtcggtggggtaggtagttattttttgggagagtttgagttttattttatatgggttattcgattcggagatttttattagaagttttaagagagagacgtgtttttatagtggttaaggggtttagttgttttttgagttcggaggggtgggtttaagaagggggtagtttttttttattaagtattataagtcgagtggtatagagtttgtgtttaattttagtagagaagtattaagggggggttggtgttttttttggttatattttttggattagagggtataaatagtatatagtggttattttttgataggagagagagttaggttgcgggaagttttttcgtttaaggtcgtgttttatgggggtttaggtgatagttaggtcggggttgattttattgtgtatttattagtttgagcgtttttaggggtggtaggtagggaggtcgaggttattgatgttggtgtttttagtatgtagttatgtaggagagttattgttttgtattggatagaggttgatggaaaagggtggtttgtggatcgtagtatttaagtatttttggaaaaggggattttgagattagtttattaagaattatgttgtttaggagattagtttttaaragaattagtttttaaagtttttatattacgtttcgtttagttttatattttttttttttatttattttagttgttgggtataagatcgagtgtgtttgtttttaatatttgttaaattttttttttaaagcggagtaggttgaatatttttttgtgttttgtagatttagggtttgaggttgaagaatatattttagatttttatattaggtattaggtacgcgggaagtattgttaaaaatgggagggttgttgtggatagcgggttgttgagaaagggcgggtagttgagtaggtagttaagttagtcggagtattgtgtgtgatttgtaggttgaggttggtttaattgttttggagttttttgatagttagagggagagaggttaggttattgttattgtggatttgtatgggttataggttaaagttatattgtttgggaaaggaatgggtagagacgagagtagatttgatagagaaaaggtgtttagtttattttgatttaaaacggggatgaagaaaagttgtgtgatatgagtagatttggttagtgtgggaaaagatagtttggtttttagtttggtatttagggtaaatggtagggagtgggtgtggagtagtaatgttgtgtatatttttgttgttagttgagatgtgggattggtattttaggggtttatgggaatttatgtgtttgggttgttgagtttaaaagtgtttttttttgttttgatataagttggttattttttgtattggagtgtttgtttttatagttgtttaggtattaatttaattttattgaaatttttttaaaataatgtttttttttttttttttatttattatattgatttaatttttttttagattgtgttttttttttgatttttgtttttatgttgttgtttttaagtatttttttttttattttttttttttttttttttttttttagtattttttgttttagattttgaatgtattttttgttgtatgtatgtttgaatgtgttttttatttaggtttggtaaattatggtttttggagtaagtgatttttaatattttttttttttttttttttttttttagaggttagatttattgtgtaaggttgttgaaatttaagttaaaggatttttgtttgtataggtttttattaatgttttgtttttaattttataattttatgttaatttttttaaagttagttattttaaatttgtaagattaggttttgtgaattttggatttgttttaagtttgtattttaattttaattgtggggttggttgattgatttggtaattgattgttggtcgtttatttttaagtagtatttgagttttggattttttagttttgtttgagggacgtgttagttatttttaattattcgtgattgtaaatagtagtaggggtaaataatttttaacgaaatttttgaggataattttaattattttttttgaataaatttttgggtttagaattgttgggttagagaggatggaagttttaaggtattttttatgtattattaaagtgttagtgaagtgtgtgtattttagaaaaatatattaatttatttagatattggaggtttgggagtagttttgtaaagggttgttttagtgtattgaaagagtatagaatttatatgggggtgatttaaaaggattataaatattcgttaaaatgagtgaggaaggtaaaatatagatatgaaagggaaaagtagtatagtaaaattttgaaaggaaaagaagatatgttaattaagttttgtattttacgttttttttttcgaagaaattattttttgttatttaatttaatattttgtagtttaagatatttgttttatgttaattaattatttgttttataggtgaaaagatgtgttgtttttagggaaagggagggagaagaatgtgttggaagtggtagggggagagtatagattttaaagttagtacggattttgtaggtggtagagtagagcgtttttatgttgagggattgcgggtgtatattttaaagtatgtgaatgtgttttgttggtggaattagtatttttttaattttataattgagtattttttttaattattttgtagattaaaattgttattaatcggaggattttagatttttgtgtaagtgtgggggtgattttgttttttttagttttggtgattgaatttagttttgtagttatattatattgagtatagagttttagatttagttttttttagagtatttgtttgagtggtttcgttgttattgtgttttgggtagtgagaattgtttttatggttagatggattagaatattttggataatgttttagatgacgtttgtattagttaggatataaatatgtaagggatttaattttttttttttttaataatatttagagtgtttgtttgtttagagttagtttttttttttatagtttttattttttgagttttttggcgttttttgaataataatagtaagtgttagggaatatggataaagtcgatttttgttttttttttttagatatggatcggttatttagttgtagggttgataattgtaatattttgtgatataaataaatgttgtttggttggcgtgtatttttagagcggacgttttttatattttattcgtttttttttttttttttgttttagacgttttggagtttaaagtggttgggtgtattggttttttttttggagacgtgttttttgtttttttttttgggatatattaagacggttgtgtttaggtatagagcgagtgttcggaaatggaagatgtgttgggttttttgttttgttaaagttgttagagtgttgtttagtgaggaataggaggtaattttaagttaaggagaatatatttttgatttgtatgaaggttgagaattaaaagaataagttagatagttttggtgagttgtttgatgtagttattattagttagatatattggtatgtaaattaattaaaaataaaatttaaaatgtagttttttagttgtatttgttatattttaagtatttagtagttatatggggttagtagttattgtattggatataatatagagagaatatttttattattacggaaagttttattgggtagtgtgggtttagagtaatgatgtaagttttaaagggttagataaggattaaaaggagaggtaagaaaaagaaaaagaaaaaaaattaatttatagtatatgtgagtattaaaatcgaaacgggtgtttatatttaattaaaaattattgtttgttgaagaggttgaattgtttttttatttataaaatatcgtagggtttgatttatatttagggttgggggtttaataatgaaaattttttgtttataatttgataggtgagaaaattgtggggttttagttgtgtgttttaaatgaaatttaagatttaggttttgatgggggagaggtttgtttttaggtaggtatgagttgtttagaggggtagaagagaaatttttgtgaagggaaaatatttagaaggggagttttgggattataggatttgttgtttttggttttgtcgttttgttgaggaaatatttagaaatggtggtgggagttttgtttttttataattttagtggtgagtatttttgtagagtttttttgttttgtgttagattttaggggaaggtgtaggttcgtttttttatttgaatttttttagggaaatggtatttttagatattgtttttggtttttatttattttatagagtttgtttttttaagtttttaagaaggaataatatatatatgaggtttgagttttaaggggatttaaaaagtattttttcggggtttttgggaaatttttttgaagatttggagaagttggtaagggtgttgttttttgagttagtgttgaatgttggttgggggtagagatagttgttttgtttagtggagaattttttagggtaagaagatagttttgttttaattagttattaacggttttgagtgtgagagtgtgaagggtcgggttaagttagttttgattttttggtgatatgttgttgtttaggaaatggttttttgataatttttattgtgatttgtttagggaaaatgttgtttttatatttgttaaaagtagttatggtgttttttgaaattttttgtttttaaggggttgtatggaattttaataattaaaatgaatttcgttagatagtatttataagaagttagatgtttttataggtataatattttttagttgagtttttgtaatattttggtgagtggtttttagtttgttatttggggaattgaggtttatagagttatacgttttgtttaaggtttattttagtttgagagattaatgtatatttattgggggtttgtgttagtttgtattttttaggaagtagatgttaggatagagataggagtgtgagagaattgttgggggcgggtattgtttgtgaaagataaatggggaagttggatgggatagagagagtttttgattttatgtagatttgattaaagttttagttaatttaatagagattattgggtagaaatagttgttttttgttagggttaggtattggttggagttgtttgggaagagtatagttttagttggaattttgtagtagattttaagaaagttgtagttggaggttgttagttgatatttcgttttgtagttgaatagtatgaagtgatttatatttttgtggttgttttggagtttgttacgcgtgaattattgtgttgggagggtgtgagatgtgttttttggtttgtagtgtggttggggattatttttgtttatatttttgtaattagtgtgtggagcgttaggattgatagtaggttattgggattggtttagaaatagaattttgagtaattttgttattagttgatttataaggtgtttttttttgatgttagagaagttataggtgatggattttagaagaaagggagttttgttttacgttgagttatcgagttttttgaattgtaaatttttttagttaagtggatttggcgattaattaaagtagaataaaatgttttattttaatttttttttttgttagaaggagttttaggaagtcgatgtaagtttaagattgggaaaaatttatagtttttgaaattacgggtttatttggtttattaatgtttgttttgattaaaaaggatttttgtgttgagtttaaattagtaatagtagtaataataatattaaaagtagtaataatgtatttgaatatttagtagatgttaagtgttatttatattggtatttatattagtttatttaatgtttttaatagtttttttagttggtagttatttgggttgttataataaattgttataggttgggttgtttataaatgatagaatttattttttatagatttagagttttggaagtttaagattagggttttagtagatttgttgtttggtaagtatttgttttttggtttatagatagtggtgtttttattttaagtttatatagtgaaagggatgagggagttttttggggttatatttataagggtattaatttatttataggttatatttttatgatttaattattttttaaagtttttatttttaaataatattattttggggtgaagattttaatatatatattttgagggaatataagtatttagtttgtagtagttggttattattttatttttatttatggaggggaagttgaggtatagaggtattattgtttaagttatatggttaatgagttgtcgagtataggtttgtgtttttgtttaatttaggttgattgtttgttaggaagttaagaattcgagtttgggggttttagggcgtttaaatatttgttttgtgaagttttgttttgtttgtttttttggaaaagttattgaattgtaatagtagtagtttttttgcggtatttttggggatgtttatttatgatttattggttatttttggggggatgttagggttttgttttttggagatgtttgattattgagtgaatagggatttaatgattttgttagggatatttgaagggtttttttttatattaaggttgtttagtattaagatagaagtgttttaggaaagatggagtattttgtaatattttatgtatttttttaattttttggggttgttttgttattatttttttatttattttgagttttattggtttttattatttatttaggaatttttgaattggggaaggtagttatggtggttagtgttttagaattatttttgggtttgtaattttattaaagaaatttatatagagttaaatttttgtattagtgattaataatatgtgagaggatgatttgtatttttaaatatttgaatatttaataaaaggtatgaatgggtataaaaaattagaaagaatgagtaagaatgagtaagaattagtatttgatagtataataaaatgataatagttaataataatttgattgtagtttaaaaataattaaaagagtataattgaattatttgtaatataaaggataaacgttttaggtgatggatattttatttattttgttgtggttattatatattatatgtttgtaataaaatattttatgtattttataaatatgtatttattgtgtgtttaaatttttttttttttttttttttgagatggagttttgttttgttatttaggttggagtgtagtggtgcgatttcggtttattgcgagttttattttttgggtttacgttatttttttgttttagtttttcgagtagttgggattataggtgttttttattatattcggttaattttttgtatttttagtagagagtgggttttattgtgttgggtagaatagtttcgattttttgatttcgtgatttgtttattttggtttttcgaagtgttgggattataggcgtgagttatcgtattcggattatgtgtttaaatttttaagaaaaataaaaaattacggaataaattttttttattttagttgatttgttggtgtgttaattatttgggagatggttttttttatttttttttatttagtgtttaagtgttgtgatgtatgtggattttagagtaaatttggtgttgtgtagtatatattagtaggtagtattgtagagggttttggtattttttttgtattaggatgggttttagagggtggatgttttagatttagttgagtagtgtttttgtttttatttttattgaatttttggttttatagtaataattagatttacgatttttgtgttataaaagggggtattgttgagatgtataagtgtttggtggttaagagagtgggttttagtattagttttgtttttagtttgttttatttagttttttgtttaggagttgtgtgattttgattaattattttagttgtttgaattttagtttttttttttgtaaagagtaataagggtatattttttattaggttggtgggggtattaaatgagatgatatttgtaaagtttagagtataatacggtatatagtaagtttttgatagatgttcgtagttattttttttgttatttgatttgatttatgaaattaatggttttttttattttgatttgagatgttgagtttttttttagtatttttgttgatttatttatttatttattagattttgagtgttgatatttaatattgaaatgaatgagatattttaatatagatatattttttattatgtgtggtttttaatatttttgttatgttttatataaatttgtatttttgtgtatttatttatattttgtttgtttttaaaaaggatttgagatggttattttaaatggagatttttgggattgtaaattttagaattttgtttgtttgttttttttttgtgtttttggaaagttaaggagtagatgggaggttatttttgttatggggagttttagtttttattttaggttttagataagtttgggaggtagatttatagttttaggatgggatatttttttaaaaagtaaatgtaaatgtattgttatattttttttgaaaaaaaattattataagaaattaataagaagatattaaggtttttttttagatttgttagaagtttgtaatttgttttattttttggattttagtgtttatttgttgtttttagatgtggaaggaaaattttagtttttttgttttgtttttttttttagttgtttttttttagtgtgtttgttaagatttgagttttaggttagggtagtagtttttgattttttattttttaatatataagttggggattaatgttattttaaggttggattttgttttcgtgtttttgttttttttagttgggtatggattttattaattttattttttgatttagcgttatgtggtgtggattgtattgttttttttttatttattgtaatttaggttttttaggataaaaattattattgttaattttttatgaatattttttatatgttagaattattgtgtttatagttttttttatgtagagtaggttattattttcgaagtatagagaagttaagttatttgtttaaggttatttagtaagtaagtaaattatagagttgtgttttgaattaaggtgggattgatttaatgttaaattgattgtttttagggttagttatgttattttttttatttttatttttattaaggttttgtttaaggtattaggtttttaaggaaaaaggagaagggttttgaaaggaaaagggttttttcggagggtatttgtgtttgtttttggttttgtagataaaatattataatttatttttgtaaattaggttattttggggtgtatggttttttaaatatttttatttgttttttttttttgtgttttattattgttttgggagggggattatgtatttgttattatttttgttttatagaaaaggaaaggaagggttagagtggttaggggatttgtttaaagttatatagttgtagttggtatatttttgggtgtgatttcggatatattttttagggtttattttattattttattatgtttgttttattttagggtttttagtaaaagtttgtggttttggttggtgatgagatttttttgagggagggaaaggagattaggtagttagaggagttatagtaatagttgttagttgtatagttggataattggtttggatttagcgggaattagtgggcgatggaattattacggtttagatttcgttagaagtggtatgttttagtttgatgacgtatttgttttttattattataatattgttgtatttttaataaattattttaaaatttagtggtttaaattaattattatttgtagtttattttttggttggtagtttaggttgggtttagttgggtggtttttttgttttttgtaggatttatttatgtatttgtggttaatttttgggttagttggttggttggttggtaaaggatggttttagttgggagggtttatttttgttttatatgtattttatttttttgtaggttagtttgggtttgtatatatggtggttgggtagggtattaatagaataattagaggtttgtatgattttttgaagtttaagtttagaagttaaattatgtttttttgttatatttttttggttaatgtaagttataggtttagattatattaagaggaggtagaaatatattttattttttgataagagaagttgtaaagttatattgaaaagagtagggatataggaaggatggggaattgtggttattttgtaatatattattggtggtgaaagtattttggttgtttttgaattattgtgatagtttgaataaatttttgtttagcgtattagaaaagggaataaggttttattaatttaaatagtaaatatagagagaggttttttaaaagaaaatgtttatttaggaatagggtattgtagtgggaatatatgtgttatagtaatttgtatgaatatttagggaggtaaaggaaaataaaggtttttaaaggaaaaatgaggattatttaattgttttgagataaattatttttggatataaggatttagtgataagggtggtattagtttgaggttggatagagagttgttaggtagatttttttatagaaggtgtgagtgtgtgtgtgtgtgtgtgtgtgtgtgtgtgtaaggttgtgatggtttttgtgtaagattgtgtttttgtagatttttttgtgttagtttttgttattagttgtttatgttatgaaaattttttttttatggcgttttaatagttttatttgttagggtttttttttttttttttaaatataagtgattttattttgattttgataattttgtaattttaaggatttatgagtttttgggtgttgttaggagttagaattgggatgagttgagtgttaaggtgtttaaatttattattgtttagtagtttaatatttttttaaatatttattttgtagtaggtattatgatgggtgttttataaatatttttttgtttaaattttataagaaatttttttaggtatatttttattttttttgttttatagaagaggaaaattgaggtttggagtgtttaagatatttgtttaagagatatagtttgttagtagtagaggtaggatttaaattttatgttattgtttgtgttttttatattttattattatgtataatttttttataaagtttagaagttaggtagaattattggtttaaaattttagaaagtagttagtatttattgtttaaatattaggagttttagtttttttaaatataagaagagtttatgaggttttttaggttttatggttttattgggtaagtattggtttttagtgagttttttttttttggaaatgaagggtttggtgtggttagaggtggttattttggtattagttttttttttatttaagtttgggttgttttttgtttagtaagggatgcggataatttttggggttttttcgtggtggatataatagtgaagaatttgatttatgtaattaaaacgtgggtttttggggaagttttggttttgggattaaatgttgaaagtaaaatttaatgggtttaaagtttttaatttttagttgttgtttttggatttggttataattttgtttgtggaatcgttgttgtggtgtttgtggggagggagggaatttttgagatattgttagtttttagttttgtttagggaggtagttgcggtttagtttttttttgttattcgttttttagagaatttatttgtagattatttttaaaatatgagataggtttagagcgaggtgggcggttggaatggagtttttatagatagtttgattatatatagggagtttaggaagtagttttgttggaaaaatgtagggtatttaaattgttatattaggagggggtttggagaggttggaaagagtatgttattggatatagatattttgggtttaaattttagttttgttatttattggtggtgtgatttaatatttttgaatggaaaatatatgagaggttgtttgataggatggttatgagtaagaaagtatttttgtgagtataattagtgttggtgtatgaatcgatgtatttatattgtttattaagagaggtaaatttttggttaatattatgatagtagtgttaatgttttggaaaagtaaggtgattgaagtttattttttgagttatttgaagtttgatggggaggggaaggtttttttttttttaaattttagtatgttttttgatatgacggagtttttatattagagtttttattttagagttgtttttaaaggtttattggggtttgtttaggtggggattatatatgtgagtagttggtattagagggggtattgggtatttgttggttttttttttttttttttaggttgatgtggggtgggtagaatagggtacgggtgatgtatttgattattggggtgtatgttatagtttggtattttaatatgaataattattttaattttttttggttatttgtttttttatttgtaaaatggggataatattagtatttttcgtagggttgttgtgaagagtaaatttgattttgttcgtaatgagtttaatttagtatttgtatattttacgtgtttgttatatgttggttgttttaattagaagtttagagttttgtattgatgagaggatttaaaaggtttatgaggttaggtatagtggtttaggtttgtaattttaatattttgggaggttgaggtaggtggattatttgaggttagaagtttaagatcggttttattaatatggtgaaattttatttttattaaaaatataaaaattagcggggcgtggtggcgtgtgtttgtagtatttagttattagggaggttgagataagagaattgtttgaattcgggaggtggaggttgtagtgagcggagatcgtcgtattgtattttagtttgggtaatagagtaagatattattttaaaaaaaaaaaaaaaaaaaaaaaaaaaaaaaaagggtttttgagtttgtggtatttttaattggggatgggataggaggagagagttttgttttttaagggtaattttttttattggttttaaatgaatataattatttgtaattagtttagatagttatatagtattttttaaattattaattatttggagagtttgttaaaatgtattttgatttaatgggttggggtttaagattttgtattttcgataagtgttaggtgttttttatgttgttggtttgaggattatatttgaagtagtaagtaaagtagagaagtagtttgatgttttgttgatggtagtttgttggtggggatatttaggtttttttatgtggtaattatagtagaaaggaatatagttttgttgagagtattaggagagttggggcgatgtttgaagtggttaggatgtttttttataatttagtagatggtatttttttagtggtttgttttgaattttgggttatggtaatttttgtattttttgggattagtttggtaaatagttagttgaattaattttagaaaagatttatttatgggttggttgcggtagttttgttggatggtggtttaggtatagagtagtgttgggttgcggaggaagttacgatgttttgtaaatatatagatataagtatattttcgcgtgttatttcgtgagtgttatgtatgtgtgtgtatgtttttttatttttagtttgattttttattgtataggatttgggaaaaattttttatttgattagttgattagaagttttgaattgaaaggttgttattagggtttgaattagttattgttgttagaattattgagtattttgggtttggaaggaaataataatttagtaggtttttttttattttagattttggtgtaaattttgtttttgttagttttggttttaggttggaggaagtagtgtttgggaataagttttttagggtttttttttgtttagataatttatgaatttgtgtttgtgaatttggagttatggtattatttgaaatttttagggttttaatgttagtttgggagatatagtggaggaagaatttgttgttttttgtagtttttttttttttttcggacgtgatgaatttttatttttgtgaatttttttgtgatttttgtaaaataaattataagtggtaattagttattgtgttgatgtaaatttggagttggtgggaatttttggattttgttgtgtggttttggggtttttgagtggaagaggtattttatgttttttaggttttagaatttgatttgtggaaaggttgaggatgttttagtagtttagatagggtaaattgttaattttttttatttgtgaaaatagttggttttatgaagcgtaatatgtgatttattttagtggttttaaagtttagtcgttatagtaagggggaaaattgattttttaatgtggttttttttttattggagttttgttttgtacgttattgtgtatttgagttatagtagataagggttagttaaattgtttttgtgtgggtgagggaggtaatgtgatttgtttgggaaagtgtttgttttgatttttaaagggttgtgggttttagttttgtttttgtttgggaattttgtagttgtgtttagtaaatatttggggaggtgtattttagggtattattgaggagtcgtaggtagtttgggtatttgtattattgggagttttgttttttttattttttagtagggtattttttttatggaattagatatagattttttaagattgatttggaaggagatattttagtgaggggtgggtttttttggttttttgtattttttaattttttaggttttaggtgttgagtttagggtagtgggaattaagatgggatttatatatatttttatgaattttaatattatgtttttgagttaggttagtgacgatgttttttgtgatatttgttagtttttgttggagttttttttgagggttttagatttttgttgtatgatgtagaggatttgtttgtttgtttttttgtttagttggagtgttgtaggaggagtagtagtattttaagattagggtgtagtgaatgattgagattttaagatgaaggtggtttttagggtagagggaagggagtttgggttagttttttatatttttaggaaagttgtttagggttattttaatttttgttaaatattttttttataaatatataatatgtaatgtattttattttaaggtatgtgggagatgatttattttatgatatagaagaaatttttgtgaggtgaatttttttttttttttaggttgttggagataaggaataacgtttgtttttattaagaagtggtttggtattttttattttttgaatattagtgtggattttgtttgaagttttattgtttaagattttttttaaatggttcgtagtttagtataaatcgtgtttgattagtgttgtttggtattttttgttatagattttttgttgattgtttttcggaaataatgtataaaattgtaggttagaattatttttgtaatatttggaggggagtttattgttatttttttcgtgttttgtatttatataggtttaaatttgttttttttgttttttgggtgggttttgttttttttttgtagtcgggggatgtttttgttggggatggtttattttaggtagttttttagtttaagatggaggatatagaggtttatttttgtttttttttgtatgtaaattgttttatttttgttttgtagtgggagagaggatacggtttataatttcgtattgttgttatttttttttttatttgtttttaaatgtttatgttgtgtgtgtggtgggtggtaggaggaggagagggagatagaagagaaatagcgtttttaaattttttatttgttattgaaatgtaatatatttaggaaagtgtttatattatatatagttattataaatttgtataatgttattgaggttgaatgataatattattcgtatttttagtaatttttttttttaattgtaattttgtttttttttttttagaggtaattattattttgttttttaatattatagttaaattttatttgtttttgaattttagataaatggaattagattgtgagtatgttattgtatttggtattttttgtttagtattgtatttgtgtagtttatttttgtggttgtagttgaatgttgtttatttgtttttattgttgtatagaattttttttttgttttgttttgtttttgagatagagttttattttgttgtttagattggagtgtagtggtatgattttagtttattgtaatttttgttttttgggtttaagcgatttttttgttttagttttttaagtagttgggattataggtatttgttattatgtttagttaattttttgtatttttagtagagatagggttttattatgttgtttagattggttttgaatttttaagtttaggtagtttgtttatttcggttttttagtgttgtatagaattttgttgtattgttgtattatgatttatttgtttattttagtattgatgggtttttaggtttttttttgttttttttttttttttttttgatattatatatgtagttttgaataattttgtatgttttttggtagaaatgtatgtaatttttattaggtatagttttagaaatggaattattgggttaaagggtaggtgtatgtttagttttattaggaattgttgaatagtttttttagtggttttaatggtttatattgttattagtagtgtatgaaggttttagttattttatatttttgttagtatttgggatttttagtttttttggtttgagttttttggttggtatgaagttgagtttttttgataattaatatagttgagtatttttttatgtatttattggttatttggttatttttttttgtgaagtatttatgtttgtttttggtttattttgttgatttgtttttttttattaattaatgaggagtttttaaaatagattttggataggaattttttgttggttgtacgtgtttttatttatttatygtagttttttgggtaggtgggattaaaagcgtgcgttgttttgtttggttatttttttttgtgaagatgggatttgttatgttatttaggttggtttgaatttttgggtttaagcgatttattcgtttcggttttttaaaatgttaggattataggtatgagttattatatttagtttttttaagttttaatatgtttgggaaagatttaataggttttattttaggattttttttttaagtttatatagaaaagtataataatatgatttttaaagtgagtatttagagagtttattcgtggttgggtgaatatttagttatttgttttttatttttttatcgtaggttgtgatagaatgttttttttttttgttgtagg

SEQ ID NO: 176 - DNA, 23683 bp, Artificial Sequence
  chemically treated genomic DNA (Homo sapiens)
tttgtagtaagagaaaaaggtattttgttataatttacgataagaaaataggaggtagatggttaagtatttatttaattacgggtgggttttttgagtgtttattttgaaaattatattattatatttttttgtgtgggtttgggggagaggttttaaagtgaaatttgttagattttttttaggtatattaaagtttaaggaggttgaatgtggtggtttatgtttgtaattttagtattttgagaggtcgaggcgggtggatcgtttgagtttaggaatttaggttagtttgggtgatatggtaaattttatttttataaaaaaaaatggttaggtaaggtagcgtacgtttttagttttatttatttaggagattgtratggatgggtgggaatacgtataattaataaaaggtttttatttaaaatttattttaaaaattttttattgattaataagaaaagataagttaatagaataggttaaagataagtatagatattttataaaagaagatagttaaatggttaataaatgtatgaaaaggtgtttaattatgttagttattagagaaatttaattttatattaattagaaggtttaaattaaaaagattgaaaattttaagtgttggtaaggatatagagtaattagaatttttatatattgttagtggtagtataaattattaaaattattgggaaaattatttaatagtttttaataaagttgaatatgtatttattttttgatttagtaattttatttttaggattatatttaatagagattgtatatatttttattaggagatatgtaaaattgtttaaagttgtatatgtaatattaaaaaaaaaaaaaaaaaaaataagaagaaatttaaaggtttattagtgttagagtggataggtaaattatggtatagtaatataatagaattttatgtagtattgggaggtcgaggtgggtagattgtttgagtttaggagtttaagattagtttgggtaatatggtgaaattttgtttttattaaaaatataaaaaattagttgggtatggtggtaggtgtttgtaattttagttgtttgagaggttgaggtaggagaatcgtttgaatttaagaggtagaggttatagtgagttgagattatgttattgtattttagtttgggtaatagagtgagattttgttttaaaaataaaataaaataaaaaaagagttttatgtagtaatgaaaataaatgaatagtatttaattgtaattatagagatgaattgtataaatataatattgaataaaagatgttagatataatagtatatttatagtttgattttatttatttaaagtttaaaagtaggtgaaatttaattatagtgttagaaggtaggataatggttatttttggagaggagaaagtagggttgtaattagggaggggaattgttgggggtgcggataatgttgttatttaattttagtgatattatataaatttgtgataattgtatatgatatggatatttttttggatgtgttatattttagtaataaatagaaaatttagaaacgttattttttttttgttttttttttttttttttattatttattatatatatagtatggatatttaggggtaaataggaaaaaaaatagtagtagtgcggaattataaatcgtatttttttttttattgtaaaatagaaatagaatagtttgtatgtaaagaggagtaagaatgaatttttgtattttttattttgaattgaaaagttgtttagggtgggttatttttagtaggagtatttttcggttataggaaaggggtaagatttatttagaagatagaagaggtaggtttgggtttgtgtgagtgtagaatacgggggaaatggtagtaagtttttttttagatgttataaaaataattttgatttatagttttatgtattgttttcggaaagtagttaatagaagatttatagtaaagaatattaaataatattaattaggtacggtttgtgttgagttacgagttatttggaaaaggttttggataatgagattttaaataaaatttatattgatgtttaaagagtagaaaatgttaagttattttttagtgagaataggcgttgttttttatttttagtagtttagaaaagagagggaatttattttataagggttttttttgtattatgaaatagattattttttatatgttttggaatagagtgtattatatattatgtatttgtggaaaaggtgtttagtagaggttaggatgattttggatagtttttttggggatgtagaaagttgatttaggtttttttttttttgttttgaaagttatttttattttgggattttagttatttattgtattttggttttggaatgttgttgttttttttgtaatattttagttaggtaaaggggtagataaataagttttttatattatataatagaagtttgaggtttttaaaggggattttagtaaaggttggtagatattataaaggatatcgttattaatttggtttagagatatggtgttaaggtttatgggaatgtgtgtgggttttattttaatttttattgttttgagtttaatatttagaatttgaagaattggagggtataaagagttagggagatttattttttattggagtgtttttttttaggttagttttggagggtttgtatttgattttatgaggaagatgttttgttggggagtgagagaagtaagatttttaatggtgtaggtatttaggttgtttgcggttttttaataatgttttgggatgtatttttttaggtgtttgttgggtataattgtagaatttttaagtagaagtagggttggaatttatagttttttggaaattaaagtaagtatttttttaaatagattatattgttttttttatttatataagagtagtttggttggtttttgtttgttgtaatttaaatgtataatgacgtataaaataaaattttagtgagaagaaagttatattaagggattaatttttttttttgttgtagcggttgagttttagagttattggggtaagttatatattgcgttttataagattagttgtttttataggtgagaagaattagtagtttgttttgtttaaattgttgaaatatttttagtttttttataggttaggttttaagatttggggagtataaaatattttttttatttaaaaattttagggttatatagtagagtttaaaaatttttattaattttaaatttatattagtatagtgattaattgttatttgtaatttattttataaaaattataaaaaaatttataagagtgagaatttattacgttcgagggaagggaaaaggttgtaagaaataataggttttttttttattgtgttttttaaattggtattggaattttggaaattttagataatgttatggttttaaatttatagatatagatttataggttatttaagtaggaggggattttggagagtttatttttaggtattgttttttttagtttagagttaagattgatagggataaagtttatattaaaatttaaagtggaaaggaatttgttgaattattatttttttttaagtttaaggtatttaatggttttaataataatagttgatttaaattttgataataattttttagtttaaaatttttgattagttggttagatgaaaggttttttttaaattttgtgtaatggaaaattaggttagagataagggggtatgtatatatatgtatgatatttacgaggtggtacgcgggaatgtgtttgtatttatgtgtttatagaatatcgtggtttttttcgtagtttagtattgttttgtatttaggttattatttagtaagattatcgtagttagtttatgagtgggttttttttgaagttaatttagttggttgtttattaggttgattttaagggatatagagattattatggtttagagtttagaataagttattgaaaagatgttatttgttaagttataaaaagatattttagttattttaaatatcgttttaatttttttggtatttttaataagattatgtttttttttgttatggttattatataaaagggtttgagtgtttttattaataggttgttattaataaagtattaagttatttttttgttttgtttgttattttaagtgtggtttttagattagtagtatggggaatatttggtatttgtcggaaatgtagaattttaggttttagtttattaaattagaatgtattttaataagttttttaggtgattgatagtttaagaagtattatgtaattatttaaattgattataaataattatgtttatttggagttagtagaagagattgtttttgagaagtaaggttttttttttttattttatttttagttaaagatgttataaatttaaaggttttttttttttttttttttttttttttttttttttgagatggtgttttgttttgttatttaggttggagtgtagtgcggcgattttcgtttattgtaatttttatttttcgggtttaagtaatttttttgttttagtttttttagtagttgggtattataggtatacgttattacgtttcgttaatttttatatttttagtagagatggggttttattatattggtaaggtcggttttgaatttttgattttaggtgatttatttgttttagttttttaaagtgttgggattataagtttgagttattatgtttggttttataagttttttaggtttttttattaatgtaggattttaaatttttaattagggtaattagtatgtagtaggtacgtagagtgtgtaggtgttgggttaggtttattgcgggtaggattaaatttattttttatagtaattttacgggaggtattaatattatttttattttatagatagggaagtaggtggttagaggaggttaagatggttatttatgttaagatgttaagttgtagtatgtattttagtagttaaatatattattcgtgttttattttatttattttatattagtttgaaaggaggaaaagggaattaataggtatttagtgttttttttggtgttagttatttatatatgtaatttttatttgagtaagttttagtgagtttttgagggtagttttgaagtgagaattttgatgtgaaagtttcgttatgttaaagggtatgttggggtttggaagagaaaagatttttttttttttattaggttttaggtgatttaaaaggtgaattttaattattttgtttttttaaagtattgatattgttgttatggtgttaattagaggtttgttttttttaataagtagtgtgggtgtatcggtttatgtattaatattggttatgtttataagggtgtttttttgtttatggttattttgttaggtagttttttatgtgttttttatttagagatgttgggttatattattagtaagtggtagagttgggatttgaatttagagtgtttgtgtttaatggtatgttttttttagtttttttaaatttttttttggtgtggtagtttaagtgttttgtatttttttaataaagttgttttttgagttttttgtgtgtggttaagttgtttgtgaaggttttattttagtcgtttatttcgttttgaatttgttttatgttttgagggtaatttgtaggtaaattttttggagagcgggtgatagagaaggattgagtcgtagttgtttttttgggtaggattgagaattgatagtgttttaaagattttttttttttttataaatattatagtagcgattttataggtaaaattatagttagatttaaggatagtaattggggattaaaaattttaaatttattaggttttgtttttagtatttgattttaaagttaaagtttttttagggatttacgttttggttatatgagttaaattttttattgttgtgtttattacggggaaattttaggaattgttcgtattttttattgggtagaaagtagtttaggtttgagtaaaggaagagttggtgttaggatagttatttttaattatattaaattttttatttttagagggaggggatttattagggattaatgtttgtttaatggagttatgggatttgaaaggttttataagttttttttatatttggggaaattgaggtttttggtatttaagtagtggatattgattgttttttagggttttaagttagtagttttatttggtttttaagttttatgggaaagttatgtatggtgataaagtgtaagaagtataggtagtaatatagggtttaagttttgtttttattgttgataagttgtgttttttagataagtgttttaaatattttaagttttagttttttttttttgtaaaataggaggaataaaagtgtatttaagaaggttttttgtaaggtttaagtaaaagaatgtttataaaatatttattatagtgtttgttataaagtaggtgtttaaagaaatgttagattgttgggtagtagtaggtttaaatattttgatatttaatttattttagttttaatttttggtagtatttaagagtttatagatttttagaattgtaaagttgttagaattaaaatggagttatttatgtttaaaaaaaaaaaaaaaaattttgataaatagagttgttgggacgttatgaaggaaaggtttttatggtataaataattgataataagaattagtataaaaaaatttgtaaaaatataattttgtataaaggttattataattttatatatatatatatatatatatatatatatatttatattttttgtgaggaaatttatttagtaattttttatttaattttaaattggtgttatttttgttattggatttttgtatttaaagataatttattttaaaataattaagtaatttttattttttttttaaaagtttttgtttttttttatttttttgaatatttatgtagattattgtgatatatgtatttttattgtaatgttttatttttgagtaaatatttttttttagagagtttttttttgtgtttgttatttaggttaatagaattttgtttttttttttggtgcgttgggtaggaatttatttagattgttatagtaatttagggatagttaggatgtttttattattagtaatatattataaagtggttataattttttattttttttgtatttttgttttttttagtgtgattttgtagttttttttgttaagagatgaaatgtgtttttgtttttttttgatgtagtttggatttgtgatttatattggttaaaagaatgtggtagaggggtatggtttgatttttgagtttaggttttaagaaattatgtaagtttttgattgttttgttggtattttatttaattattatgtgtataagtttaggttagtttgtaagaggatgaaatatatatggagtaaaaataagtttttttagttgaagttattttttgttagttagttaattagttaatttagaagttgattatagatgtatgagtgagttttgtagagaatagaagaattatttagttgaatttaatttaagttgttaattagagaataagttataggtggtggttgatttaagttattaagttttggggtggtttgttagggatgtagtaatattgtggtgatagaaaatagatacgttattaagttaaggtatgttatttttgacggaatttggatcgtggtaattttatcgtttattaattttcgttaagtttaaattaattatttaattatgtagttgataattattgttatggtttttttagttatttggtttttttttttttttttaaaggaattttattattaattaggattatagatttttattgaaggttttgagatgggataggtatggtggagtagtagaataggttttaaagagtgtattcgaagttatatttaggagtgtgttagttatagttatgtgattttagataagttttttggttattttgattttttttttttttttttgtaaaataaggataataataaatgtatgattttttttttaaggtagtgatgaggtataaaaggaaaaggtagatgaaagtgtttgggggattatgtattttaggatggtttgatttgtaagagtagattatggtattttatttgtaaggttaagagtagatataaatgtttttcgaagaagtttttttttttttagggttttttttttttttttttagaaatttgatattttggatagggttttgatggaggtggaggtagggagggtagtatggttaattttgagaatagttagtttagtattaaattagttttattttggtttaaagtataattttgtaatttatttatttgttgggtaattttggataagtgatttggtttttttgtgtttcgggagtggtagtttgttttgtataaagggaattatgaatatagtggttttggtatatagaaagtatttataaaaggttggtaataataatttttattttggagagtttaggttatagtaaatggagggagagtagtataatttatattatataacgttaagttagagaatgaaattggtggagtttatgtttaattgggaaaagtagaggtacgggggtagggtttaattttggagtgatattggtttttagtttgtgtgttagggagtgaaaggttagaggttgttgttttggtttggggtttaggttttggtagatatattgaggggaggtaattggagaaggaggtaaggtaaaaggattgaggttttttttttatatttgaaagtagtaagtgaatattaaaatttaagggatagagtaaattatagatttttggtagatttaagaaaaagttttgatatttttttgttggttttttgtgataatttttttttaagagaaatatggtaatatatttatatttattttttaaaaaagtattttattttggaattgtagatttattttttagatttatttggagtttggggtgggagttggagttttttataataagggtggttttttatttgttttttggttttttaagagtatagagaagaaataggtaggtaaaattttaggatttataattttaaagatttttatttaaagtagttattttagattttttttggaagtagatagggtgtaaatgaatgtataaaaatgtagatttatgtagagtataataaaaatgttagaggttatatataatgaagagtgtgtttatgttagaatattttatttattttagtgttgagtgttaatatttaaagtttgatgaataaatgaatgaattaataaaaatattgaaagaaaatttagtattttaagttaggatgaaaaagattattggttttataaattagattaagtaataagagaaataattacgagtatttattaagggtttattgtgtgtcgtgttgtgttttgggttttgtagatattattttatttaatgtttttattaatttaatgagggatgtatttttattattttttatagaaaaggaaattgaggtttaaatagttgaagtaattggttaagattatatagtttttaagtagagagttgagtaaggtaggttgagggtagggttaatgttggagtttatttttttggttattaggtatttgtgtattttagtagtgtttttttttatggtataaaaatcgtggatttggttgttgttgtggaattagggatttaatgaaggtagagataggaatattatttagttgaatttggaatatttattttttaggatttattttggtgtaaaagaggtgttaagattttttgtaatgttgtttattggtgtgtattgtataatattaagtttattttgggatttatatatattatagtatttggatattagataggaaggggtaggaaaggttattttttaggtggttaatatattaatagattagttaagatggaggaaatttgtttcgtgattttttattttttttaaaaatttgggtatatagttcgggtgcggtggtttacgtttgtaattttagtatttcgggaggttaaagtgggtagattacgaggttaggagatcgagattattttgtttaatatagtgaaatttattttttattaaaaatataaaaaattagtcgggtgtggtggggggtatttgtagttttagttattcgggaggttgaggtaggagaatggcgtgaatttagaaggtggagttcgtagtgagtcgagatcgtattattgtattttagtttgggtgatagagtaagattttattttaaaaaaaaaaaaaaaaaaagatttgggtatatagtaggtatatatttatgaggtatatgagatattttgttataggtatgtaatatgtaataattatagtagggtaaatggggtatttattatttgaagcgtttattttttatgttataagtgatttaattatatttttttagttatttttaaattataattaaattattgttgattattgttattttgttgtgttattaaatattagtttttatttatttttatttattttttttaattttttgtatttatttatgttttttattaagtgtttaaatatttgaggatataaattatttttttatatattgttggttattggtgtagaagtttgattttgtgtgggtttttttaataaagttataaatttaggagtgattttgaaatattggttattatggttattttttttaatttagagatttttaaataagtggtgggagttagtagaatttagagtggatggggggatagtaataaagtagttttaggaggttagagggatatatggaatattgtagagtattttattttttttgggatatttttgttttaatgttagatagttttggtgtgagaagaggttttttaaatgtttttggtagaattattgggtttttgtttatttagtgattaaatatttttagaaaatagaattttagtatttttttaagagtagttagtgggttatgaataagtatttttaaaggtgtcgtagagaagttattgttattgtaatttaataatttttttaggaaagtaggtagaatagaattttataagatagatgtttgagcgttttgaagtttttaaattcggatttttgattttttgataggtagttagtttgggttgggtaaaggtataggtttgtgttcgataatttattagttatgtaatttgggtaataatgtttttgtattttagttttttttttatgaatggggataaaatgatagttagttgttatagattgaatgtttgtgtttttttaaaatgtatatgttgaaatttttattttaaggtaatgttatttggaggtggggattttgggaggtgattaggttatgaggatataatttatgaatgagttagtgtttttataaatgtggttttagagagtttttttattttttttattgtgtgagtttagagtgagaatattattatttatgaattaagaaataggtgtttattagatagtaaatttgttggggttttgattttggatttttaaggttttagatttgtgagaaataaattttgttatttataagtaatttaatttataatagtttgttatggtagtttaaatggttattagttgaaaggattgttgggaatattaaatgagttggtatgagtattaatgtagatagtatttgatatttattgaatatttagatatattgttgttgtttttggtgttattgttgttattgttgttaatttaaatttaatatagaagttttttttggttagaatagatattggtggattaagtgagttcgtggttttaaagattgtagattttttttaattttggatttatatcggttttttaggattttttttggtaaaaaggaaggttgggataaaatattttattttgttttggttgatcgttaaatttatttggttaaaaggatttgtagtttagagaattcggtggtttagcgtaaagtagagtttttttttttttgaaatttattatttgtgatttttttgatattagaaagaggtattttgtgagttagttggtggtaagattgtttaggattttgtttttgggttagttttaatggtttattgttagttttgacgttttatatattgattatagaggtatgagtaaagatgatttttagttatattgtaggttaaggagtatattttatatttttttaatatagtgatttacgcgtggtaggttttagggtagttatagaggtgtgggttattttatgttgtttagttgtaaggcggaatgttagttgatagtttttagttgtagtttttttgggatttgttgtaggattttagttgaggttgtgttttttttagatagttttagttaatatttgattttggtagaggatagttatttttgtttagtgatttttgttgagttgattgagattttaattagatttgtatagagttagaggttttttttgttttatttaatttttttatttgttttttataggtaatattcgtttttaataatttttttatatttttatttttgttttagtatttgttttttaaaggatgtaaattgatataagtttttagtgaatgtgtattgattttttaggttggggtgggttttgaataaggcgtgtaattttgtaagttttagttttttaaatagtaaattggaaattatttattaggatgttataaagatttaattaaagaatattatgtttgtgaaagtatttgattttttgtagatattatttgacgaaatttattttggttgttaaaattttatgtaattttttgaaagtaaggaattttagagaatattatggttgtttttaataaatgtaaaaataatattttttttgaataaattataatagaagttattaggagattattttttgaatagtagtatgttattagggaattagagttggtttggttcggttttttatatttttatatttagggtcgttaatgattggttgagataagattgtttttttgttttggaaggttttttattgggtaagatagttgtttttgtttttagttagtatttagtattagtttagaaaatagtatttttgttagtttttttagatttttagagaaattttttagaaatttcgagaagatgttttttggatttttttggaatttaggttttatatatgtgttgtttttttttgagagtttgagaaagtaggttttgtagggtgagtgaggattaggaataatgtttgaaaatgttatttttttagaaaaatttaaatgaggaagcggatttatatttttttttagagtttggtataggatagaggaattttgtaaagatgtttattattgaggttatgagaaggtagggtttttattattatttttgggtgtttttttagtaagacggtagggttaggggtagtaggttttatgattttagggttttttttttaaatgttttttttttataggagttttttttttgtttttttgaataatttatgtttgtttgaggataagttttttttttattagagtttagattttaaattttatttgagatatataattagaattttataatttttttatttgttagattgtgagtaaaaagtttttattgttgaatttttagttttaaatatagattaggttttgcggtgttttatgagtagaaagataatttaatttttttagtaggtaataatttttagttagatgtaagtattcgtttcggttttagtatttatatatgttatgggttgatttttttttttttttttttttttatttttttttttgatttttgtttagttttttaagatttatattattgttttaaatttatattgtttagtagaatttttcgtgatgatgaaaatgttttttttgtgttgtgtttaatgtagtagttattagttttatgtggttattgagtatttgaaatgtggtaagtgtaattgagaagttgtattttaaattttatttttagttaatttatatattaatatatttggttagtggtgattatattagatagtttattagaattatttagtttgtttttttaatttttaatttttatgtaaattaaggatatgttttttttggtttggaattgttttttattttttattgaataatattttgataattttaataaagtaaaaagtttagtatattttttattttcgagtattcgttttgtgtttaagtatagtcgttttgatgtgttttaggagagggagtaggaagtacgtttttagaaaggaagttagtgtatttaattattttggattttagggcgtttggggtagagaaggaggaggggacgggtggggtgtgaaagacgttcgttttgggagtgtacgttagttaggtagtatttatttatattatagggtgttatagttgttagttttgtagttgagtaatcggtttatgtttaaaggaaggggatagaaatcggttttgtttatgttttttggtatttattgttgttgtttaaaggacgttagaagatttagggagtgggagttataggagaggaagttggttttgggtaggtagatattttgggtgttattagaaaaaaagaaaattgagttttttgtatgtttgtattttagttgatataaacgttatttggaatattgtttaggatattttggtttatttagttatggggatagtttttattgtttagagtatagtgatagcgggattatttaagtaagtattttgagagaagttgggtttggggttttgtgtttagtgtgatatggttatagagttgggtttagttattagggttgggaaaagtaagattatttttatatttatatagggatttaggatttttcgattagtgataattttggtttataaaataattgagagaaatgtttagttatgggattagagaagtgttagttttattaatagagtatatttatatgttttgagatgtatattcgtagttttttaatatgggaacgttttattttgttatttgtagagttcgtgttgattttggggtttgtgttttttttttattatttttagtatatttttttttttttttttttttagagataatatatttttttatttgtaaaataggtagttaattagtatgaagtaaatattttagattgtaaaatattgaattaagtaataaagaataattttttcgagaagagagacgtaagatataaggtttaattaatatgtttttttttttttttaaagttttgttatattgttttttttttttatgtttatattttattttttttatttattttgacgagtatttgtgatttttttaagttatttttatgtaggttttatatttttttagtgtattagagtagttttttgtaaaattatttttaagtttttagtgtttgaataaattaatgtatttttttaaagtatatatattttattggtattttggtaatatataaagaatgttttgaagtttttattttttttgatttagtaattttaagtttaggaatttatttaaaggaaataattaagattgtttttaagggtttcgttaaaggttgtttatttttgttgttgtttgtaattacgaataattgaaaatgattgatacgttttttaagtaggattagaagatttagggtttaggtattgtttaggagtaagcgattaataattagttattaagttaattaattaattttatagttgaagttaaggtatagatttaggatagatttagaatttataggatttgattttataaatttagggtgattaattttaagaaaattaatataaaattataaaattggggataaggtattaataggggtttatgtaagtaagaattttttggtttaagttttagtagttttgtataataagtttagtttttagaggaaagaaaaaggagaaagaagatgttggaagttatttgttttaaaggttatagtttattaagtttgggtaaaaaatatatttaagtatatatatagtaaaaaatatatttaaggtttaagataaagaatattgggaaaaagggaaagagaaaaaaggatggggaggaaaatatttgaaaataatagtatgagaatagaaattaaggggagaatataatttaagaaaaaattaagttaatatggtgggtgagggaggaaaaagaagtattattttaaaaagattttagtagagttaagttggtgtttgaatagttatggggataagtattttaatataaagagtagttagtttgtattagaataagagagggtatttttgagtttagtagtttagatatatgggtttttatggatttttgaaatattagttttatattttaattggtaataagaatatgtatagtattattgttttatatttattttttattatttattttgggtattaagttgaaggttagattgtttttttttatattggttaaatttgtttatgttatatagtttttttttattttcgttttaaattaaagtaggttgaatattttttttttgttagatttgttttcgtttttatttattttttttttaggtagtgtggttttgatttgtggtttatgtaaatttatagtgatagtggtttggtttttttttttttagttgttaaagagttttaaggtagttgagttagttttagtttgtagattatatataatgtttcggttggtttggttgtttgtttagttgttcgtttttttttagtagttcgttgtttatagtagtttttttatttttgatagtgtttttcgcgtgtttggtgtttagtgtggggatttgggatgtgttttttaattttagattttgagtttgtaggatatagaaaaatgtttagtttgtttcgttttaaaaggggaatttgataagtgttaagaatagatatattcggttttatatttagtaattggagtaagtgagagagggagatgtggagttgggcgagacgtaatgtgagggttttgaaaattggttttyttgaaggttgattttttgaatagtatgatttttagtgggttggttttagagtttttttttttaggaatgtttgagtattgcgatttataaattatttttttttattagtttttgtttaatatagagtagtgatttttttgtataattatatgttgagagtattagtattagtgatttcgatttttttgtttgttatttttaaggacgtttaggttggtgaatatataataaaattaatttcggtttggttgttatttgggtttttatgaggtacgattttgaacgggggaatttttcgtagtttaatttttttttttattaagaagtgattattgtgtgttgtttatattttttggtttagaggatgtggttaaggagggtattaatttttttttagtgtttttttgttggggttgggtataagttttgtattattcggtttatggtgtttaatgggggagagttgttttttttttaggtttattttttcggatttaggggataattggattttttggttattatagaaatacgttttttttttaaggtttttggtgaaggttttcgggtcgaatggtttatatgagatgagatttaggtttttttaagagataattatttgttttatcggcggkttattgggaagtgtttttttattttttttttttttatattttaggagttttttcgttttatttttatttagggttttgtaggagttgggggggggrggggcgtcggggttttgggttttagtgcgtttagtggattttagatattttgtttttgggagttttatttcgcgtagcgttggagaggttatattttttttttaggggtttttaaaatcggggaggggtgtagttttagtgtttcgatttttttaggttttgcgaggtttaggaggttcgttgggttagcggcggtcgttcggaggtagaggagttaagttamttttcgatttagagagtgaagtcgagtttagttgggcggcggaggagataattttagcggttttttttttacgttttgggttgggattttagggaggtattcggacgttttcgttcgtttttaggcgtcgatttcgattttagcgggtttcggacggcgtttttttttttttcgtcgtttttcggcggtcgagtcgcgcgtaacggagaatatttaaatcgttttttcgggacggcggcgtggaagagatcggaaaggcggcggcggcgttggtttgggggtcggggcggtggtcgcgcgggttagggtcgcggagtcgggcgggtatttattagcgcgtgttgtcgtggaaatgttttagaattgcgtagtcgaagaacgagttagcggggttttggaagtgtacggggcgttgcgggttaaggttgtaggcgttcgcggggattttcgcgattattagcgttagtagtagcgcgcggagtttttcggcgtttttcggcgtagtcgggtcgtttatttttagtcggtcgtcgtttttttttttgttcggtaagtagggcgtttagcgcgcgggtcgcggggttcgtcgacggttaggaagtttttcggggcgggagttttgcgtttggatacgggcggaatgcgggcgtcgggttcgttatcggggcgcggacggcgggttgagcgggcgttgaaggcgagtataggggcggtttcgagcgggcggtttttagttcgttcgagaagtttgcgcgagcgggttcgggcgggcggcgttggtttgcggagggcgtttcgcgaggtgggcggttcgggcggcggcggttggacgcggtaggcgtttttgcgtcgtgagttttgcgcgtattttcgggcgggagttagtttttgggatcgtcgggcgtttcgaattgtttttttttcgtcgacggggcgttcgggttttcggagataaggttgttttttttcgttattaataggttttttrgttttgttgggtttgtttttttgtttttgtttttttttttttttttgttttataattagtaagatttagagtaattcgggtgaaggacgagtttagattttaggttttagttttgcgtattttttgtttttttatttagttgtgagataagttgtaggagtagtgtttagtaaacgtcggttgttgttgtttataataatagtagttacgtggaagcgagtagagtatttttttatattttagttatttggtttcgtatattagtgattttcgaagtgtgttttcggattagtagtattaacgttatttgggaatttgttagaaaatgtaaatttttaggttttatttagttttgttaaatcggaagttttgaaggttggagtttagtagggtttgcgtgtattgaagggtgtgtgtgtgtgtgtgtgtgtaattgtaaatatgtataatagaaagtttattattttaattatttgtaattgtgtagttcgggggattaagtatatgtatgttatgtaatttttattattatttatttttataattttttattttggaaaataaattttatattttaaataataatttttttttttttttaattttatttttatttttatttttattttggtaattatttttttattttttgtttttatgaatttgattatttaaatttaagatttttattgaattgattgttattatgttgaagtttgattatattattatggtttttttgtttgtgtttttttttttttattttttaattttataatagagtttggataatggttgaaaatttttcgttgttttttattatttatttttgtttataggatggagttcgatttttttagtataattttatatggaggttttatttttttttttagttttattttatgttttttttttgatttattttttataaattttataatgtatttatatataatttttagttgttttttgaacgtgtttaataggggtttttatatatatttgtgttttttttaacgttgttttttttttttgaaatgtgtttatttttttttaattggtaaaattttatttattttagatttttaggttagtttttgttttattttttttgtgttatttttttttttttttttttttttgggttgttaaagagtgtttatatgtttttattttaatatttagaatatgtttattattttgggggttttttgtttttttttatagacggtatagttttttaaggagaaaaaagttttagatatttttgtagtttttaaggtttagtttagtgttaggtttaggtagatgtttaaatattgttgaaagaatgaattggttgggcgtagtggtttatttttgtaattatagtattttggggaggttgaggtgggtggattgaggttaggagtttaagattagtttggttaatatagtgaaattttgtttttattaaaaatataaaaaattagttaagtatggtggtatatgtttgtaattttagttatttgggaggttgaggtaggagaatcgtttgaagttgaggggtcgagtttgtagtgagtcgatagtgcgttattgtattttaatttgggtgattgagtaagattttatttgaaaaaaaaaaaaaaaaagaaaagaaagaaaaagaatagttgggtacggtggtttatgtttttaattttagtattttgggaggttaaagcgggtagatttatttgaggttaggagttcgagattagtttggttaattatggttaatatggtgaaattttatttttattaaaaataagaagattagttagacgagatgtcgtacgtttgttattttagttatttgggaggttgaggtaggagaattgtttttatttgtgaggcggaggttatagtgagtcgagaatcgtgttattgtattttagtttgggtgatagagtaagaatttattttaagaaaaatgaaaaaaaaaaagaatgaattgtttaaagaaaagtaagtttagtaagaggatgaggtattatgggggagatttgaaggagattttaatttttttatgttttggttgtgtgagagtgaaaaaatgattaattttcgttgtagaatataaaatataaggtttttttttgtttttttttttttggttttgttgttgtttttgagatagtgtttcgtttttgttttttaggttggagtgtagtggtgtaattattgtttattgtagtttcgattttttaggttttagtaatttttttattttagttttttaagtagttgggattatagatatgtattattatgttcggttaatttttatatttttggtagaaacgaggttttgttatgttgtttaggttggtgttaaatttttgagtttaagtgatttatttgttttggttttttaaagtgttgggattatagttatgagttattgtgtttggttgaagtttttatttgtggtagagagtattagtatttttttaatatttatattttttattttttttattaataaagtttagagttagtggagtgttaatatgtttagttttaaaaataaataaaattatgttttttagttttttttgtagatagagtggttatgtgtagtgtttggttaatgagrtatgagtatgttatttgggtggtaggttttttaggaggttttttaaaggagaggtaatttagttgatttatggtttttgttttgtgtttttgttttttttgtatgaagtatagaggttatggttggagatgtagtagttgttttgagggttattttaaaggaaaggttaggagaattgtagagattttagttgttatatgttagaattgttgtatttgatatgggatgtttttttggggattttttattatttgaaaaaaagtaaatatttaatttataagagttattgtttttagggattttgttattygtaggtaagtagaattttttgttgatttaatatttagaatgaatggaatttagaatagatgtttttaatttagagtttatttattttttatgttgttttagaggttttaagattttttgtggttggtagattaatagttttttttttaatttttggaatttgtgaatatgttattttatatggtaaaaaaggattgtaaatgtgattaaggttaagggttttgagatggaaagattttttaggattatttggttgggtatagtttaattatgtgaatttttaaaagtagagaatttttttttggttgtagtacgagaaagagatgtgaagtggaagtggggttagagagatgttatattgttggttttggagataaaagaagggattatgagttaagtaatataggtagtttttagaagatggaagagataataaaatggattatttyttagagtttttagaaaggtaatattttgagtttaatttagtgagatttttgttttatttttgatatttagaattgtaagataataaatgttgttgttttaagtcgttatgtttgtgattatttgttatagtagaagtaggaaattaatatagttttttagaattatatataaaagtgtgtatgtgtgtgtttgtgtgttttttagggaaagatttatagattttaatagattttttaaaggtaaggtaggttttagaagataggaaattattgatttaaaatatattgatttttaattttggaaattaaattttaaaaatgatatcggttaaaaattatagtattggtgtttgatttaattaaatagtagttgttaattttgattgtatattagattattaggtaattatttaaaaatatagatttattaataatattttaggttagaatttaggggtaaggtaggaatttgtatttttaatattttttgggagatttgttaagtagttaggtttgggaagtattgttttataggagagagatttagaattttgtattgtattttttaatttgtggtattatgatgtggtaagaaaaacgtaggatttggtatttggtgaagagaatttaatttttaggttcgaataattgtgtaattttagtaaattaataaaataaggatattaataattaataaatttattgatgagttttttaggatagtattttttaattataaaacgttaaatatgtattagttattcgtataatttgagtttaagagtgagtttaattttttagttgttagaataagttgttttatagagatttgatttgaagggcgtgtttttagggttattagttggaggggagaggtatattattttaaatttggttatgtaaaatgtagatttgttttatggaatggagatttttgaaaaattgaattttttgtttaattttttaacggaaatggtaattaaatgttttttatttttttatgtttttattttaagaaggaatttgaaggttttttattagttttagtggttgtaaattgaatagtatgttttattagtttatttagtattggcgttttttataagttgtgtaaaattgttttttatagttattttgttaaatagttatattgttaaataattaaatagttatatatatattttgttgaattgttattgttat

SEQ ID NO: 177 - DNA, 15518 bp, Artificial Sequence
  chemically treated genomic DNA (Homo sapiens)
agttaggatggtttcgaatttttgatttcgtgatttattcgtttcggtttttaaaagtgttgggattataggcgtgagttttcgcgttcggtttttaatagttgttttaatgtttcgtgtgattattttagtattgggattatttcggagttggtatttattagttatttttttttttataagtttttaaggttttttttgttgttgtttgagtatttttgggttgtattatggatattttgaatattatttaataagattttggattttattaaaattttttggataataatgatttttttgttttgttagtagttagtttggttagggttagattataagtttagatttgttttttgtgggttgtggtttttatgtgagtttagtttttattttttttttttttttttttttttttttttttttttttttttttttttttttttttttttttttttttttttttttttttttttttttttttttttttttttttttttttttgataggattttattttgttatttaggttggagtgtagtggtgtgattttggtttattatagttttggtaacgtagcgagatttagtttttattaaaaaaagaaagaaagaaataatagtaataaaaagaaaatttacggaattgtgtaattattattataatttaattttagagtatttttattttttgaaagatttttttgtttatttgtagttatttttttttagtttttttaaaaaaaaaaaaaagatataaattattttaagaatatagaatagtatggagagtattagtattaatttttaaatagttattttttattttattaaattttaatatgttgtttgatttgtttagaattttttttttttttttagtaaagaaaattttataatagaattttgaagttttttgtttttattttttaggttcgtagttttttttgtttttaggggtaattattgttttgttttaggggtgtgtgggtttgtagggacgaggtgtatgttattttttaatgtttttttttatattttgttttttagaagaattttagtgttacggatttgtgggttacgaggttttagagtagtattttaagggtttttatttattatttcgtagcgtgagtgtggtattatggatgtatgtgatttaggttatatttgggtttattttttaggagtgttgtttttttttttttatgttattttttggatagtatttaattttatttaattgtgttcgtgaatttggtttttttatggtttttgtgttttagaatatgtggttattttttttgtggtttagtaattatgtgtttattattgttttattttgtaatataattgtgtttaagttggagacgaatggttacgttttttaaattttttatttgttaaatttgtatttttatttgatttttttttgtttgtttgttgttgtttttgtttttgagtaagagttttttttttattatttaggttggaatgtagtggtataatttcggtttattgtaatttttgttttttaggtttgagtgatttttttgttttagttttttaagtagttgggattataggtatgcgttattatgtttagttaatttttgtatttttagtagagatagggttttgttatgttggttaggttggttttgaatttttaattttaggtgattcgtttatattagttttttaaagtgttgggattgtaggtgtgagttatcgcgattggtttgatgtgtttatttttgagagagatttgttagagatatttgttgtttggggttgtgttagtttgtttatatatttgttagtttttgttttatatattttgaagttcggtatataaaggattatggttgttgaattgtttgtggattttgatttttattggttatatttttttttgtttatttgatgtattttgttttgatttttatttttttgatgttatacgatattttcgttagtattttttagtatatacgtgtatttttcgtttttttatttttagtttttagtgtttttttttaatagtttatttgatagagagttttttttatattttttattttttaattgtgataaaatatatataatataaatttattattttaattatttgaagttatgtattttcgtggtattaaggatatttagtattgtgtaattattattattaatttttttaaaattattttattttgtaaaacgggaattttatattcgcgaaataataattttatatttttttgaaatgtttttttaattttattataaaaaattttatatatttatagaagtagagagaatagattagtgaagttttatgtttttaatagtggttttaaaaataattaatttataggtgattttgttgtattaatatttttttcgatttttttttaatttaatttatttttttttattgggaaataaatttgaaatattatattgtattatttgtaaatattttaatatgtaattttaaaagatggggattttttaatataattataaattattgttatatttaaaataattaataatgattttaaaatatggtttatgtattgtaattggttttattaagagattaaattttttaatttaaagggttttttttttttcgtttttttttttgtattgtgttgtttgttttgtgagggtttttttagtttggattttgttaattgtatttttacgatgttatttaatatatttttttgatgtttttttgtagatttaaaaagttcgatttgatttaggtttaatagtaatatttgttttttttattttttttgatttttattgttattttattaagattaatttattaaaggtgtgtgtataacgtttgttgcgttcgtgacgttcgtagcgagggttattgtttattttaagttattagcgggtgtagtagaatggtattttttttttgtttttttttattattttttaggttaagtttgtaatgagaagatatttttgatagagaatattttattggaatttgttttgtttttttatttttaaaatttaacgtaagattttgttgatttaaaataagaaaatgtaatttatttataggtgttgtgatttttgatgggtttgaaattatttttaatgttttattgtttggtttttatttattttttttgtttgttttatttttttttattttttttttttaaaggatttgttttttttttttttttttttttttagttatttagattggagtgtagtggtgtaagtatggtttatcgtagttttaattttttgggtttaagtaatttttttattttagttttttaagtagtttggattatatcgcgtgttattatgtttggcgaatttttagaaaatttttttgtagagatgagggtttgggtttttaaatgttgtttaggttggtttcgaatttttgggtttaagtgatttttttatttcggttttttaaagtgttgggattataagtttgagttattatgtttaaaataaagatttgttatatttttttttaggtatatatatgttatttttatttttaaggagatttttgaattgttagtatatatatttagatattttttattaaaatgtttattgataagtatttatatttttttttagataggatggaacggtaatgtgttttttggttttttttaatttagttttttaggcgttttgttttatagcgttaatatttttattattattttttaaattaataggttatgatattataatttttatttatttttttgtttaattttgtattatttgtttttgtattttttatggatttttttatgtttatttttgtaagatatttttaaaatagagtttaggagtcgggagttatggtttacgttagtaattttagtattttggaaggtagaggtggatggattatttgaagttaggagtttaagattagtttggttaatatagtgaaattttgtttttattaagaatataaaaattatttaggcgtggtggtatatgtgtttgtaattttagttatttgggaggttgaggtaggagaattgtttgaattcgggaggtagaggttgtagtgagttgagattacgttattgtattttagtttgggtgataaaagtaaaattttgttttaaaaaaaattgaaaatataaaaataaataaataaataaaatagagtttagggtagtaatgtgtttgagtttttgttttgaagatgtttgatttgggttttttttttaggtataatttttttttttttttttttttttttttttttttttttttttttttttttttgagtttgtagtattttttttttcgtgttttgtggtatttttttaatgtttttagttaataggattttatttatttatttttggggtgtttagtggtttcgtaatttacgttttcgtttagattcgtagttttttttttgtgatttgagtgtttttttttcgttgtttttgttttgttttttttcgtttttatatgtaggtggatgttaatgcgtgtacgtatttaggtttttttgtttgtttttatttttttattttttttggttggttttttcgttttattttttggtttaggaatttgttttttagggttttttatttcgttttgtagtagaatgtgttattgttgttttttagtattaaattttttatttttatggtttttgtgtttttttttttaatgggtgttttttttgtttggcgtttttggaggtcgggttttttttttaagtgtgaatttgatggaagtaggtttttttcgtcgggattttatgtgagaaatgatatgttttatttgttttaaggggtcgttttttgatattagagttgttgtagagcggagaggggtaggggtgaagggttacggtggtgtaatttattattttttttaaggaggagttgagaggaataggaagtgttaggattttacgattcgcgtttttagttgaggtttttagacgtgatttagggtagattggtagtaaagtttttacgtttagttaggagtatcgtcgaggattttagtatatcgagggtgagtgtgtagaggtttcgttatgtttacggtgatttttggagggaagtatttttttgttttagtttggagtgattttggtggttttgtttatagtttcggtttaggggtgtttggtaggaaggggtttttagatcgtttgttttagggttttttttgagattcggtaaggggaagtgtttgttattaagagtagagttatatggtgtgttgggagcgtttgcggttgaggatggggtcggtatgggaggataaggggttgtgaggtcggtaaggttaggaagaggttgggtttataagtttttagggggacggttggggggttttggtgtttcgggttgggtaggaggtaggttttcggggttttttttgtgaatttgttgcgtttgtttgtgttaggtttttttgtttgtatgttgtttcgtttggttatagcgattttatttttagatcgattcgtagtgtgtggtgtgtgatatggtgtggtgtggttcgtggtgtgtagtgtcgtgtgtgtagtgtggtatggtgtgtatgtatggtgtacgtgtgtggtatagcgtagtgtggtgtgtgtgtgtgtatgtatggtgtgcgagtgtgcgtatgtgatgtggggagtttgttgtatgtatatgtatggtgtatatgtgtaatgtagtgtggtgtggtgtggtatatgttttatgtttttttgggattttcgagtttttttgtttttttcgtggggatttttgggtgacgttttgttgtaggggagcgggtatcgttgtgcgattttggtcgagttggtttagttggtgattttggtttttttataataggtttttggaggttatttttaaggttttggtgggagggggattgaagttacgtttttgggttttaggtttatttggttttttttttttaatattgtatttttggggttagttttttttatgtattttttatttttggtattattttttgtattatcgtttttatatttaatttttttttttttggatttgggagttgggattttgttttgttgtttttgtttattcggggttttttttttttgttagtttttgggtggggagaaggaggggtggtatggttgtaatggggaaggggggggatggtcggagagtttagtttgggagcgagttgtgggggtataggggatattcgttgttattcgtttttttcgtgacggtggcgtaacgtttgcgggtttgggggttgaggtcggattttggaggttttatagaaatgagttgttagaagttttgggttgtttgtcgttattttagcgttttattatgagtgaagtttagtttattgtagaatttatgtttagtttattgtagaattttcgggggttagtattttattaagagtggtttttagattttatattttaggaaggaattttttttttatttagtttatagtagaatttttagggtttttgttagtttggtatttagcgtgttttttagtattttggggatgagtgggggagtttttttgttgggaagaggtttttggttacgtttttgtagggcggcggttgagtttatgtttcggttttagggttagttttcgtcgggtgttattttgagtagggttatagaatagatgttttatatggttaggatttttgtggttatttgatttcgggggggttgtggttttcggtgaagtaggtgatcgggcgggttgtggggtttgttagtttcgtagcgttattgtcgtttagcgtatgagtttttatttttagtatttaatgaatagttgagtaattgtaggtgttttcgagtgttgggagaggggaatgtttagtttcgagtgttgggagaggggacgtttagtttcgagtgttgggagaggggacgtttagttatttaagggtttttgttttaagggagtaaataggggtattttttggtgggcgtgggttgggttggagaagtagggttttttggtaggggttggtatgagatttaaatattgtttaggtagttggatatttttgagtttggagttttttatttgaattatagggtggtaatttttgttttttaggcggtatcgacgtgatttgtttagtgtatagtgagtttgaggtaatacggttattattaggagattttttggggaagaggtttttagatagcgaggtgtttatgaaggaagttttgtataggggtcgcggttatttaggagatgggaggggttttatttgtattttgtttggaaggggtatggggtgagtaggttatttggtttttcgtgatttagtttttttatttgtgaaataggaggggtggtttggttaattgtgcgtattttagttgtttttatagttaatcgtgtaatttgaatttatttttttagggtttttgttaggtttaggtttgtttattttggtttaggtcgggttttattaggtattagggttgtgggatatttgtttttgtggatggggtagcgtgacgtttgtggcgattttatggaataggttttgtgtgggttttttttgttgtattcgtgttttgtgttagagaatcgtggttttgtttgaggttatgttatcggaggttggttttcgttttcggaggagaatgttagttgttataggggttagtgatataggtatttgtttagtaggtataggttaggtcgttgggaagttttaatttaaggggttttgtagtgggcgtttagtaattatggagttgtgggtgatatttattttaagtcggatttggtgttagtaattattttttttattttgtttggtataaattggtattgatacggggtattgattaggtggttgtatttgtcgatttcgagtttatgtgtgtggagtttaggttttgagtaagtatagagggttttggtgttgttttgagttgaggtttttgtttatttcgggttgcgtgtttttttcggttatttagggtttgagagtgtagaagagttagttttaggggaatatttttttgtttagttgatttgtaaatagtttcgttggggatatatgttggtgttgggagtggtggaggtttttgtgtgtgatggaaatttggggtaggtgttggggaaaagaggtgttgagagttttagtagagggtagagtttaggagttttggagtgtagtttttagtttttgcgtcgtgtttagaggagaggttggtaagtttttgttttatggatgggtgaatgggtgagtgatagtggtaataagtttatgttagtagggaggttttattgttatgaagtagcgtttttattaacgttatagtgggaataagaaagttagtagttttggaattcgaaggagtaattttagtataattcgtcggttattatgaaattttatttttaaaatgttttttatttatttattataaaaagggtggaaaatataaataggaataatgaaaattgaaaatatttatagtgttattatttagagaaatgtagaatattttggaattgtgtttttttttttttttttataaatttatttttattacgaagttaagttgttttgagtagttgtttgtatgttttcgttgttgtgtgggattttatagcgtaggtatcgaaatcgttaaagtattttatacgttgacggttatatagggaattaagatattttggttgaaatttttggtttttttttggggtgatttatatgttttttagttagttttttttttttttttgtgaattatttgtttagggtgttatatttttgaaatatttttgaatggagtatttatttttttgttattaatttttaagatttttttagagatgaagattattatttattttttgtattagagagataatagttattttttttatgtaatttgttagtataatatgtgttatttttagagtttgtttttttgttatttttttttttagtttttttttttttttttttttgagatagttttatttttgttgtttaggttggagtgtagaggtgagattttagtttattgtattttttgtttttcgggtttaagtgatttttttgttttagtttcgcgagtagttgggattataggcgttcgttattaagtttagttaatttatgtatttttagtagagatggggttttattatgttgtttaggttggttttaaatttttgattttaggtgattcgtttgttttagttttttaaagtgttgggattataggtatgagttattatgttcggtttttttttagtttttatgttgaggtttttttatttttagatatttatttttttattttttttattgttttattttttaaaattgaagttttatatatttgtggttatttttttatgtttatagtaagagtgttcggggtttcggttttacgtcgttatttaggaatagatagttttttttatgttagatggaggagtggtgtttttttgtttaaaatgttgtaaatattatttgatttttttttgattttaggtatttagtagagtattttagtattttttattaatatgtgtgtgtcgggggggtggggtgttttattttattttatttggttagaaattgtggtttttaaaatttgtgttattaggtcgggcgtagtggtttacgtttgtaattttagtattttgggaggtcgaggtaggcggattacgaggttaggagttcgagattagtttggttaatatggtgaaattttatttttattaaaaatataaaaattagttgggtttagtggtgtgtatttatagttttagttatttaggaggttgaggtagaagaattttttgaatatgggaggcggaggttgtagtgagtcgagatttagttattgtattttagtttggatgatagagtgagattttattttaaaaaaataaataaataaataaaattgtgttattaaattttatagatagttaaattaatagtaggaatacgtttttttgatttttgggaaaatacgtttttgtagggtcgtaggtttagaggcgatatgggttgggtttttttgtattttttttgtttcgatttgtttttatttgatttgatttgtttttgtttttggattttttggagtttttgtgatttaaggatagtgttttagtttttatttgacggtatttttttttagttttttattatatttttataaagtagaaatgagtttattttgatgttttggtttttggtttaaaaggtggatgtttagtttataattattttttgagtttttagtttttagcgtaggggttggtttttatgtttttttttttttaattttgttttttggcggtatcgtttattatttttcgcgtattttcgagttattttgatgcgagtgttttttttttaggatagcgtaaggtgggttttagtataggtaggaggaagttttgatgtaaagttttaatgggtttgcggggtttttggttttttaagtagtttcgttttagggttttacggggttgtaaaaaggaagtttgagattgggtacggtggtttacgtttgtaattttagtattttgggaggtcgaggtgggcggattatgaggttaggagatcgagattattttgattaatacgatgaaatttcgtttttattaaaaatataaaaaaattagttgggcgtggtcgtgggagtttgtagttttagttatttaggaagttgaggtaggagaatggtatgaatttgggaggcggagtttgtagtgagttgagatcgcgttattgtattttaggtcggtgatagcgtaatttcgttttaaaaaaataaaaaggaagtttgatttcgttggattttttttttagtataggttttgttttttttttgttgttttgtttaaagttttttttttttttttttttttttttttttgagatagggtttcgttttgttaattaggttggagtttagtagtgttattagggtttattgtagttttttttttttgggcgcgagtgatttttttgttttagttttttgagtaattgggattagagatgtatgttattatgtttggttaatttattttttatttttattttttgtagaggtaggagttttattgtgttgtttaggttgtttttaaatttttggttttaagtgatttttttgttttggttttttaaaatattgggattgtaggcgttagttattaggttggttttttttttttttgtgtttgtttttgtttttttgttttcgatttttgtgaaagggtgtgtgtgatttggttcggatttgttgtaggttttttttgacgtcgttttcgtgttttagagtttgaatgtttagagttttgtttatcgtgaagtgtggtttttgttagttgtgtttatttggtgttcgggagggaagggcgttcggtttttgaggggtttttcggggaaggatgatttcgtttttttggttttgtttttttagttttttgttttttttgtgtaggggatttggtgataggtattattttttgtagttgggttggggttgtattagtatttttttttcgggtagggttgaggttaagggcgattttgatgtaaggttttgagaggtttgtggggttgtggatttttaagtagttttagttttgggttttgtattttaggttttggtaaggggattcgttcgtttttagatgggggatgtttagagttggaggatgaggagggtattcgtttttggtgtggggtagtagggagggttttggagaatgaggagggtatttgtttttagtgtggggtagtagggagggttttagggtgattaggttttaggttagagttttggggttagtttaggggttggggtggggggtgtttgtgttttttttttttttttgttttgtagttttgtcggtttagttttagggtattagaggtgatagtggttaggtatttgtttgttcgaatgttgttttatatttgtgttttatttatttttattttttagggagttggtataggtttttcgattatttttaggtatatggaggaaattgaggtagataggtttgatggggttttggttttttaggttttaggtgaggttttggattttcgtgggttattttggttgttgggtagaggggttgttttgttttgtttttttatagaagggaggttggttgttaggtttagtgtattgttttattttttggagcggatttttatttttagttgtttgtttgggtttagttattggtattggggggtggggtagggtttggttttttttgtgtttttagttttaagttttttagggttgtttatggaggagtaatagtggggagaaggtggttttttattagttttttttttgtggttaaggttggggtgtcgtggtttttgagttaattttgttggaattaaggtgtattttttttttttgtgggtaggtgggagtgttcggggtaattgggtattaggtttatattttgttgttgttggggtttttagtttttttatttgagggtatgaagtgtttgtatgttattggttacgattgtgttaggggcggagattttatgtttgcggttttagggagagcgtggagttggggtgtgagtttttattagtttggttggggttgttaggggaggtttgtattttttttttatttggcgtagttgcgatttgggggagttttgaagtcggttggattttgtattttgggggagttttgaagtcggttggattttgtattttgggggagttttgaagtcggttggattttgtattttgggggagttttgaagtcggttggattttgtattttgggggagttttgaagtcggttggattttgtattttgggggagttttgaagtcggttggattttgtattttgggggagttttgaagtcggttggattttgtattttgggggagttttgaagtcggttggattttgtattttgggggagttttgaagtcggttggattttgtattttgggggagttttgaagtcggttggattttgtattttgggggagttttgaagttggttggattttgtattttggggtagttttagtacgtatagggttttcgattagttgaggggttggtgggtattcgtggtatcgaggttagtttaggcgtaggattttgagggggtttagatggagagttggaattggtttcggtttgaattataatttttaacgattagagatatgggggtttttagatatagggtgggtttaatgtgaattaaaattattttttttaggaagttatagtagggtgtaggttttgtttttgattttaggacgggaaggattaagggtttttttttgatatttttgtattttgattataattttgttgggaattagggaatgaggttattgttaaaataataggattttggggtttgttggggcgtttaagttgtgggatttttagatgggtttttggtgggtgtttcgttggttttagagtttttagtataggtgtagggttttcgggggatggaggggagttagggtttgtggttgagggtattcgagtttttcgggttatagtatagtatttagcgttgtttttaaagtcggtaggttttagtttggggttttgttggtttgggtttgtttattgaattttgggtggttttgttagtattattcgagggaagggtgtggggtaggaacgttttagtagtttgggaggtcgtgataggaattggtatttgttggaggaggtgtgttgatttttgtttttgataatagttttagggtaacggaaatgtttttttgtttattatgataggaaggtttttgggtatttttttttagtatttttttatttttttggtgttagataaaagggttttagttagttataatgtttttaggttttgggaggttagatttaggggtttattttatttaggaagttttaagattttttaaggagtcgatttaggtttggtttgggtatttttcggatggagggaagggaatttaggggtggaacggttttgttgttcgttaggaggtgttgtcggtttttagtattaggttgaggtttgttttcgttattttgtttttggggtcgagggtttgtgagtgattattgagtcgtttttggttgtggatgcgtgggttaaggacggggtgggtgtgtatttggaaataaaagggtaggatttcggtaattggtggtttgggtaagttaggtgatttttttttttatttggtagggattgtagggtttttgggtaggtttagtatatagtttggtattcgcgggtattaagttagttttttttttttggtatatagtttggtattcgcgggtatttagttagttttttttttttggttatgtttttgttatagagagatagggttaagtttagtttttttttaagtataggttttgtttacggaggatttggggtatattggggtagagtgtatatatcgggtgtgtggggttttggtgtttgtgtgcgtgtatatttgtacgtgtgtatggtgtgtgcgtgtggtgtgtgtgtttgtgtggtgtgtatgtgtgtgtacgtgtgtatgtgtatatttgtgtgtggtgtgtagtgttttgcggggagtatggtgtgggtaaggggtgtatatatttttgtgtgtatatatgtgtggtgtgatgtatgtatatgtgtggtgtgtgtatgtacgtggtgtgtatatgtagttaggtatatatttgtatgtacgtatacgtgtatgtgtggtgtgtgtatacgtttgtatgtgtgtgtgtgtttgtgttgtgtgtttttgtaggggttcgttgtagttgttttgggtgtttggttgagtaggtgtgttgttcgtattgttgagttcgggatttttttttttttggttgttggtagttgggtttagtgtagttgtgttggtttgattttaatttattttttgtagtagggatagggttttagttttttgttttaggttagttggaggggagttttatgggtggttagttttaggggttgggtttgagatcgttattaagattttttttttttataggatatgttgggtttgcgttttttattgttcgttttggtggggttgttttttttcgggtgcggtgagttttgtgttttacggaggggattttacgcgtgatattttaattagggagaatagggtttgtttttatttttttatagatagaagttttcgggaggttggggaaggattttgttattgggggtaggtcggggatttaggtttcgttttcgtacgtgttaggaggttgtagttgtgttgtttttcgagggtttttttttgtatttgggggtggtggcgaatgcggggtttttttttggaggttgtttttttgtttttttgggttttttttgatttttttgttttatttttttttgggtgtgggtagggcggtttagagtatttatttattagtcggtttcgttttttagt

SEQ ID NO: 178 - DNA, 15518 bp, Artificial Sequence
  chemically treated genomic DNA (Homo sapiens)
attgagggacgaggtcggttggtgagtgggtgttttgggtcgttttgtttatatttaagggggagtagagtaggaaggttagaggaggtttaaaaagatagggaggtagtttttaggaggagatttcgtattcgttattatttttaggtgtaaagaggggttttcgggaaatagtatagttatagttttttggtacgtgcggagacgaggtttgagttttcgatttatttttagtggtaaggtttttttttagtttttcgggaatttttgtttatgggaaagtgagggtaggttttgttttttttgattggaatgttacgcgtggagtttttttcgtggaatatagaatttatcgtattcgagggagagtagttttattagggcgagtagtggggggcgtaggtttagtatgttttgtggagggaaggggttttggtgacggttttaggtttaatttttggggttgattatttatgaagtttttttttagttggtttgggataaggagttggggttttgtttttgttgtagggggtgggttagggttaggttagtatagttgtattgggtttagttgttaatagttagggagggagggatttcgggtttagtagtgcgggtagtatatttgtttagttaggtatttaggatagttgtagcgggtttttgtagaggtatataatataggtatatatatatatgtagacgtgtatatatattatatatgtacgtgtacgtgtatatagatgtgtgtttgattgtatgtatatattacgtgtatgtatatattatatatatatatgtattatattatatatatgtatatatagagatgtatatattttttatttatattatatttttcgtaagatattatatattatatataaatatatatatgtatacgtatatatatatatatattatatagatatatatattatacgtatatattatatatacgtgtaaatgtatacgtatataaatattagaattttatatattcggtgtgtgtattttgttttagtgtgttttaggtttttcgtgagtagagtttgtgtttggaggagagttgggtttggttttgtttttttgtggtagaaatatagttaggaagagaaagttggttggatgttcgcgggtgttaggttgtgtgttaggaagagaaagttggtttgatgttcgcgggtgttaagttgtgtgttaggtttgtttaggagttttgtagtttttgttaggtgggaaaaaaagttatttgatttgtttaagttattagttgtcggggttttgtttttttgtttttagatatatatttatttcgtttttaatttacgtatttatagttaggggcggtttagtggttatttataggttttcggttttagaggtaaaatgacggaagtaggttttagtttggtgttggaggtcggtagtattttttagcgggtagtagggtcgttttatttttgggtttttttttttttattcgggaggtgtttaaattaggtttaggtcggttttttggggggttttagggttttttaggtggggtgggtttttgggtttgattttttaggatttgagaatattatagttggttgggatttttttatttggtattaagaaggtggagaggtattgagaaggggtatttaggagtttttttgttatggtgggtaggaagatattttcgttattttggggttgttgttagaagtaaagattaatatattttttttagtaaatgttagtttttgttacggttttttaggttgttggggcgtttttgttttatatttttttttcgggtggtgttggtagggttatttaaggtttagtgggtagatttaagttagtagagttttaaattagggtttgtcggttttgaagatagcgttgggtgttgtgttgtggttcgggaggttcgggtgtttttagttataggttttggtttttttttatttttcgaaagttttgtatttgtgttgggggttttgaggttaacggaatatttattaggggtttatttgaggattttatagtttagacgttttaataagttttaaggttttgttgttttggtagtgattttattttttggtttttagtaaaattataattagaatataaaaatgttaaaagggaatttttgatttttttcgttttggggttaaaaatagaatttgtattttgttgtaattttttggaggaggtggttttggtttatattgggtttattttgtgtttgaaagtttttatatttttgatcgttgggggttgtggtttaggtcgaggttagttttagttttttatttgggtttttttaaagttttgcgtttggattgatttcggtgttacgagtgtttattagttttttagttgatcggaggttttgtgcgtgttggagttattttagggtgtagggtttagttagttttaggatttttttagggtgtagggtttagtcggttttaggatttttttagggtgtagggtttagtcggttttaggatttttttagggtgtagggtttagtcggttttaggatttttttagggtgtagggtttagtcggttttaggatttttttagggtgtagggtttagtcggttttaggatttttttagggtgtagggtttagtcggttttaggatttttttagggtgtagggtttagtcggttttaggatttttttagggtgtagggtttagtcggttttaggatttttttagggtgtagggtttagtcggttttaggatttttttagggtgtagggtttagtcggttttaggatttttttaggtcgtagttgcgttaagtggggagggggtgtagattttttttggtagttttagttaggttggtaaggatttatattttagttttacgttttttttggggtcgtagatatgaggttttcgtttttaatatagtcgtgattagtggtatgtaaatattttatatttttaaatggggaaattgagggttttagtagtagtaagatatggatttggtgtttagttatttcgggtatttttatttgtttatagggagagggggtgtattttgattttagtaggattggtttagagattacggtattttaattttgattataggaagggggttggtggggagttattttttttttattgttgtttttttatgagtagttttggggggtttggagttgggggtataagagaagttaggttttgttttattttttaatgttagtggttgagtttagataaatagttggggatgaaggttcgttttaggaggtaaggtagtgtattgagtttggtagttagttttttttttgtgggagaatagggtagggtagtttttttgtttagtagttaggatggtttacggaggtttagggttttatttgaggtttgagagattaagattttattaggtttatttgttttagttttttttatgtgtttggaggtggtcgaagggtttgtgttagttttttgggggatgggaatgggtaaggtatagatgtagggtagtattcgggtaaataggtgtttggttattgttatttttggtgttttgaggttaagtcggtagagttgtagggtaggaggggaggaagagtatagatattttttattttagtttttgagttggttttagagttttggtttggagtttgattattttgaggttttttttgttgttttatattgggggtaggtgttttttttattttttaaggttttttttgttgttttatattaggggcgggtgttttttttattttttagttttggatattttttatttaagggcgggcgggtttttttattaagatttaaggtgtaaaatttaaagttgaggttgtttaggaatttatagttttataggttttttagaattttgtattagagtcgtttttgattttaattttgttcgagaaggaagtgttggtgtaattttagtttagttgtaggaagtggtatttgttattaagttttttgtataggggaagtagggggttgagggggtaggattagggggacgaggttattttttttcggagaattttttaggggtcgggcgtttttttttttcgggtattaaatggatatagttaataagaattatattttacggtgagtaaagttttgaatatttaggttttgagatacgaaagcggcgttagaagagatttgtagtagattcgggttaaattatatatatttttttatagaagtcgaggataggagaataggagtaaatataggaaaggaagaggttagtttggtggttgacgtttgtaattttagtgttttgagaggttaaggtaggagaattatttgaggttaggagtttgagagtagtttgggtaatatagtgagatttttatttttataaaaaataaaaatagaaaataaattagttagatatggtggtatgtatttttagttttagttatttaggaggttgaggtaggaggattattcgcgtttaggagggagagattgtagtgaattttaatggtattgttgaattttagtttagttgatagaacgaggttttgttttaaaaaaaaaagaaaagaaaaagaaaggaaattttaagtaagatagtagagagagggtagagtttatgttgggagaggaatttagcggggttaggttttttttttatttttttgagacggagttgcgttgttatcggtttggagtgtagtggcgcgattttagtttattgtaagtttcgttttttaggtttatgttatttttttgttttagttttttgagtagttgggattataggtttttacgattacgtttagttaatttttttgtgtttttagtagagacgaggttttatcgtgttgattaggatggtttcgattttttgattttatgattcgtttatttcggttttttaaagtgttgggattataggcgtgagttatcgtgtttagttttaggttttttttttgtaatttcgtaaaattttaagacgagattgtttgaggaattagaggtttcgtagatttattggaattttgtattagagtttttttttgtttgtgttgaaatttattttgcgttgttttagaggagaggtattcgtattaaagtgattcggaggtgcgcgggaagtgatggacgatgtcgttaggggataaggttggaaggaagaggatatgggagttaatttttgcgttgggaattgaaggtttaagggatgattataaattaggtatttattttttaagttaaaagttagagtattaagatggatttatttttgttttgtaggaatgtgataaagaattggagagaagtgtcgttaggtggggattggaatattgtttttggattatagaggttttaggaaatttagggataaaaataggttagattaaataggaataagtcggagtagagaggatgtaggaaaatttagtttatgtcgtttttgaatttgcgattttgtaaaagcgtatttttttaagggttagggagacgtgtttttattgttggtttgattatttgtgaagtttgatagtatagttttgtttgtttgtttgtttttttgagatggagttttattttgttatttaggttggagtgtaatggttagatttcggtttattgtaattttcgttttttatgtttaagaaatttttttgttttagttttttgagtagttgggattataggtgtatattattaggtttagttaatttttgtatttttagtagagatggagttttattatattggttaggttggtttcgaatttttgatttcgtgattcgtttgtttcggttttttaaagtgttgggattataggcgtgagttattgcgttcggtttgatagtataaattttaaaggttataatttttggttaaatgaaataaaatgagatattttattttttcgatatatatatattaataaggaatgttaaagtattttgttaaatatttgaagttaaagggaaattaaatgatatttatagtattttagataaggggatattatttttttatttaatatgaaggagattgtttgtttttgggtggcgacgtgaggtcgaggtttcggatatttttgttgtggatataaaagaatggttataaatgtgtaggattttagttttagggaataaaataataaaggaaatagaagaataggtatttaagagtaaggaaattttagtataaaagttaaggggaggtcgggtatggtggtttatgtttgtaattttagtattttgggaggttgaggtaggcggattatttgaggttaggagtttgagattagtttgagtaatatagtgaaattttatttttattaaaaatatataaattagttgggtttggtggcgggcgtttgtaattttagttattcgcgaggttgaggtaggagaattatttgagttcgggaggtagagggtgtagtgagttgagattttatttttgtattttagtttgggtaataagagtgaaattgttttaaaagaaaaaaaaaaaaaaagttaagggggaaaatagtaagaagatagattttaaaaatggtatatgttgtattaataaattgtatagaggaaatagttattatttttttagtgtaaaaggtaaatggtaatttttatttttaaagagattttagaaattaataataaaaaggtaaatattttatttaaggatgttttaagggtgtggtattttgagtaggtaatttataaaagaaggaagaaaattggttaagaaatatatgagttattttaggaaagaattagggattttagttaaaatattttgattttttgtgtagtcgttaacgtgtaagatgttttggcggtttcggtgtttgcgttatggagttttatatagtaacgaaaatatgtaaatagttgtttagggtagtttggtttcgtggtaaaagtgaatttatggggaaaaaaagagagatatagttttaaaatattttgtatttttttgggtggtggtattatgagtatttttaatttttattatttttgtttgtattttttattttttttgtgataaatgaataaaggatattttaaaaatggaattttatggtggtcgacgaattatgttgaaattgttttttcggattttaaagttattggtttttttgtttttattgtgacgttgatgaggacgttgttttatggtagtgggatttttttgttggtatgggtttgttgttattgttatttatttatttatttatttatgggataggggtttgttagttttttttttaggtacggcgtaggggttgagagttgtattttaggatttttggattttgttttttgttgagatttttagtattttttttttttaatatttattttaagtttttattatatatagaaatttttattatttttaatattaatatgtgtttttagcgaggttgtttataaattagttgggtaggaaggtgtttttttggggttaatttttttgtatttttagattttgaatggtcggagagaatacgtagttcggggtgggtaggggttttagtttaggatagtattagggttttttgtgtttgtttagggtttgggttttatatatatgggttcggaatcgataaatgtaattatttaattaatgtttcgtgttagtgttagtttgtgttaagtagaatgggagggataattgttggtattaggttcggtttggggtgggtattatttatagttttataattgttaggcgtttattgtagagttttttgagttggggttttttagcgatttggtttgtatttgttgggtaaatgtttgtgttattgatttttgtggtagttggtattttttttcgggaacgggagttagttttcggtgatatggttttaggtaggattacggttttttgatataggatacgagtgtagtaaggggggtttatataggatttgttttatggaatcgttataggcgttacgttgttttatttatagaggtaaatgttttatagttttggtatttggtggggttcggtttgggttagagtggatagatttgggtttggtaggagttttggggaagtgagtttaagttatacggttgattatagagatagttggagtgcgtataattggttagattattttttttgttttatagatggggaaattgagttacgggggattaaatagtttgtttattttatgttttttttagatagggtgtagatagggttttttttattttttggatggtcgcggtttttgtgtagaattttttttatgggtatttcgttgtttgggggttttttttttagggagttttttggtggtggtcgtgttgttttaggtttattgtgtattaggtaggttacgtcgatgtcgtttgaggggtaggggttattattttgtggtttaggtgagaagttttaggtttaggagtgtttagttgtttgggtagtgtttggattttatgttagtttttgttaggaggttttgtttttttagtttagtttacgtttattaggaaatgtttttatttatttttttgaggtaaaggtttttgggtggttaagcgtttttttttttagtattcggagttgagcgtttttttttttagtattcggagttgagtattttttttttttagtattcggaggtatttgtagttgtttagttgtttattgagtgttgggagtggaaatttatacgttgagcggtagtgacgttgcggagttgataaattttatagttcgttcggttatttgttttatcgagggttatagttttttcggggttaggtggttataggggttttggttatgtgggatatttgttttgtggttttgtttaggatggtattcggcggggattggttttggggtcgaggtatgggtttagtcgtcgttttgtagggacgtagttagggatttttttttagtagagggatttttttatttatttttagaatattgaggggtacgttgggtgttaggttggtagggattttggggattttgttgtgagttggatggggaaggagtttttttttaaaatgtggagtttggaggttatttttggtaaagtgttggttttcggggattttgtagtgagttgggtatggattttgtagtgagttgggttttatttatggtgaaacgttggggtgacggtagatagtttagagtttttagtagtttatttttgtgaagtttttagaattcggttttagtttttaaattcgtaggcgttgcgttatcgttacggggaaggcgagtgatagcgagtgttttttatgtttttatagttcgtttttaggttgagtttttcggttatttttttttttttttattgtagttatgttatttttttttttttttatttaggaattgatagaggagaggggtttcggatggatagggatagtagggtagaattttagtttttagatttaggggaggggggattgggtgtggggacggtggtgtaaggggtggtgttaggggtggaggatgtatggggagggttggttttaagagtgtagtgttgggggaagggggttaggtgggtttgggatttaggggcgtggttttaattttttttttattaggattttgggaatggtttttaggagtttgttgtggggaggttagggttattagttgaattaattcgattagaatcgtatagcggtgttcgtttttttatagtaagacgttatttaggggtttttacggaggaggtagggaagttcgagggttttagaggagtatggagtatgtgttatattatattatattatattatatatgtgtattatatatgtatatataatagattttttatattatatgcgtatattcgtatattatatatgtatatatatatattatattacgttatgttatatacgtgtattatatatgtatattatgttatattatatatacgatattatatattacgaattatattatattatattatatattatatattgcgagtcgatttggagatggaatcgttgtagttaggcggggtagtatgtagataggagggtttaatataggtaggcgtagtaggtttatagaggaggtttcgggaatttgttttttgtttagttcggagtattaggattttttagtcgtttttttaggggtttgtgggtttagtttttttttggttttgtcggttttatagttttttgtttttttatgtcggttttatttttagtcgtaagcgtttttagtatattatgtggttttgtttttggtggtaggtatttttttttgtcgggttttaaaggggattttggagtagacggtttggagatttttttttgttagatatttttgggtcggggttataagtagggttattagggttattttaggttggggtaggagagtgtttttttttaaaaattatcgtggatatagcggggtttttgtatatttattttcggtgtgttggagttttcggcggtgtttttggttgggcgtgggggttttgttattagtttgttttgggttacgtttagaaattttagttggaggcgcgggtcgtaaagttttgatattttttgttttttttagtttttttttggaggaagtggtgggttgtattatcgtggttttttatttttgttttttttcgttttatagtagttttgatgttagagagcggttttttgagataggtgggatatgttattttttatatgaggtttcggcgagaaggatttgtttttattagatttatatttgggagaggggttcggtttttaggagcgttaggtagaaagggtatttattaggaagaagaatatagaggttatgggagtgaaaagtttgatgttggaaagtaatagtagtatattttgttatagagcggaatgaaaaattttggggagtaaatttttgagttagagaatggagcggaggaattagttaaggaggataaagaggtgggaataggtaagaaaatttgggtgcgtgtacgtattgatatttatttgtatgtgagggcgggaggggatagaatagggatagcgaggaggagatatttaggttataggaggaaggttgcggatttgggcggggacgtggattgcgaggttattgaatattttagggatggatggatgaggttttgttaattagggatattaggaggatattatagaatacgaaagggaaaatattataggtttagagagagagagaagggagaggaggaggaggaggaagaggagggaaagagattatatttagaaaaaaaatttaaattagatatttttagagtaaggatttagatatattattattttaaattttgttttatttatttatttatttttatgtttttagttttttttgagatagagttttgtttttgttatttaggttggagtgtagtggcgtgattttagtttattgtaatttttgtttttcgggtttaagtaatttttttgttttagttttttaagtagttgggattataggtatatgtattattacgtttgggtaatttttgtatttttagtagagatagggttttattatgttgattaggttggttttgaatttttggttttaagtgatttatttatttttgttttttaaagtgttgggattattggcgtgagttatggttttcggtttttaaattttgttttaaagatgttttgtagaaatagatatgaagaaatttatgagaaatataagagtagatgatataaagttgggtaaagaaataagtaaaaattatgatgttataatttgttgatttaaaaaatagtggtaagaatattaacgttgtgaaataaaacgtttagaggattgggttgggaggggttagggagtatattgtcgttttattttatttggggaggaatatagatgtttgttagtgggtattttgatagaaaatatttaagtatatatgttaataatttaagagtttttttaagaataaaaatagtatgtatatatttgaaaaaaaatatgataaatttttattttgggtatggtggtttaaatttgtaattttagtattttgggaggtcgaggtgggaggattatttgagtttaggagttcgagattagtttaggtaatatttggagatttagatttttatttttataaaaaaattttttaagaattcgttaggtatggtagtacgcgatatggtttaggttatttgggaggttgaggtgggagaattgtttgagtttaagaggttgaggttacggtgaattatgtttatattattgtattttagtttgggtaattgagaaaaaaaaaaaaaaaaaaaggtaaattttttaaaagaaaaaagtaagggaaaatagaataaataagaaaggtaaataaaaattaaataataaaatattgggaataattttaaatttattaggaattatagtatttgtgaatgggttatatttttttgttttaaattaataaggttttgcgttgggttttagaaataaagagataaaataagttttaatgaaatgttttttgttaagggtatttttttattatagatttagtttagaaaataatgaagaaggatagaaagagaatattattttattatattcgttgatgatttaaagtaagtaatgattttcgttgcgaacgttacggacgtagtagacgttatgtatatatttttaatgaattagttttgatgaaataataatagaaattaagaaaaatagaaagaataaatgttattattgagtttgaattaggtcgaattttttagatttataaagaagtattaggagggtgtgttagatgatatcgtagggatgtaattagtaaaatttaggttgaagaaatttttataaggtaaatagtatagtataagaggagagacgaagggagagagattttttagattaagagatttaattttttaatagaattaattgtaatgtatggattatattttaaaattattgttaattgttttaagtgtgataatggtttgtggttatgttaaaaagtttttattttttagagttatatgttgaaatatttgtagatggtgtagtataatgttttagatttattttttaataaagaggggtgggttgggttgggggagagtcgggagaggtgttgatataataagattatttgtgagttgattatttttgaagttattgttggggatatggggttttattaatttattttttttatttttgtagatgtgtgaaattttttgtagtaagattaaaaaaatattttaaggaagtgtaaagttattatttcgcgggtataaagttttcgttttgtaagatgaaatggttttggagaagttggtggtgatggttgtatagtattaagtgtttttaatgttacggaaatgtataattttaaatggttaaaatggtgaatttatgttatgtatattttattataattaaaaagtaaaaagtgtaagaaaggttttttattagataaattgttaaaagagaatattgaaggttgaaaataaagaaacggaaaatatacgtatgtgttagaaaatattaacgaagatatcgtgtaatattaaaaagatagaaattaaagtaaaatgtattaaatggataaaggaagatgtagttaatgagagttagaatttatagatagtttagtagttataattttttgtgtgtcgaattttaaaatatataaaataaagattgataaatatataagtaaattgatatagttttaaatagtaaatatttttaatagattttttttagaaataaatatattaggttagtcgcggtggtttatatttgtaattttagtattttgggaggttgatgtgagcggattatttgaggttaggagtttaagattagtttggttaatatggtaaaattttgtttttattaaaaatataaaaattagttgggtatggtggcgtatgtttgtaattttagttatttgggaggttgaggtaggagaattatttaaatttaggaggtagaggttgtagtgagtcgagattgtgttattgtattttagtttgggtgatgagaaggaaatttttatttaaaaataaaaataataataaataaataagaaaaaattaaatagaaatgtaaatttggtaggtagagaatttgaggaacgtaattattcgtttttaatttaaatataattatgttataaagtgggataatgataaatatataattattagattataagggaaataattatatattttaaagtataaagattataaggaggttaaatttacggatataattgaatgaaattagatgttgtttaaaggatggtatgaaagaaaaaaaatagtatttttgaaaagtggatttaaatatagtttagattatatatatttatggtgttatatttacgttacggggtaatgaataagagtttttgaagtgttgttttgaagtttcgtgatttatagattcgtaatattgagatttttttgaaaagtaaaatgtagaaggaggtattgaagaataatatgtatttcgtttttgtagatttatatatttttagagtaggatagtggttatttttgaagatagagaaggttacgggtttgggagatggaagtagagggttttaaagttttattgtagagttttttttattaaaaaggaagaaaaagttttgggtaagttaggtaatatgttaagatttggtaagatgagaggtagttgtttggggattggtattagtgttttttatgttgttttgtatttttaaaatagtttatattttttttttttttttaaaggagttaggaggaagtgattgtaaatgagtagaaggattttttagggggtggaaatgttttgaaattagattgtggtgatgattgtataatttcgtaaattttttttttgttgttgttgtttttttttttttttttttaatagagattaggtttcgttacgttgttaaggttatggtgagttaagattatattattgtattttagtttgggtgatagagtaagattttgttagaaagaaagaaaggaagaaggaagggagggagggagggaaggaaggaaggaaggaaggaaggaaggaaggaaggaaggaaggaaggaaggaaggaaaaagaaaagaaaaaataaaaattgaatttatatgagaattatagtttataagaggtaggtttggatttgtggtttaattttaattagattgattgttagtaaaataaaaagattattgttgtttagaggattttagtagaatttagagttttattaaataatatttaaaatgtttatgatataatttaaaagtatttaaatagtaataaagaaaattttgagaatttgtaagagaaaagataattaatagatgttaatttcgagataattttaatgttgaaatgattatacggagtattaaaatagttgttagaggtcgggcgcgggggtttacgtttgtaattttagtatttttggaggtcgaggcgggtggattacgaggttaggagttcgagattattttggtt

SEQ ID NO: 179 - DNA, 5539 bp, Artificial Sequence
  chemically treated genomic DNA (Homo sapiens)
tagtagagatagggttttattatgttggttaggttgattttgaatttttgattttaggttatttgtttgttatagttttttaaagttttgggattataggtatgagttattgtgtttagtttttttaattttttaaaaaaggttaaaagtatgttgggtatatttttttatagtaatatttaaaattgtttttattttttttaatgataatatagaattttatcgtgtagttgttttttgggagacgattaaaattttttttatttttattgtggtagtggagatgtgggtgtgtataatagttaaaatttaataagttgaatattttaaatagatgtagtttattgtatgtaaagtatgttttaataagatgatttaaaaatattattttttttgagatttgtattttgtttatgtgaaataaaataaaataaaaattttgtttttgtgtttaggagatatattttgatatatttggaggtagagggttatgttgtttgtaatttatttttataggttttgaaataataataatagtagtatatttatagatttagagagagagaaatttgtggtaaaaatgtttataagtaaaattagataaagggtaaaaataaaagaaataatgaaattacgttttttaaatttttttttttcggtcgggtgcggtggtttacgtttgtaattttagtattttgagaggttaaggtaggtagattacgaggttaggagatcgagattattttggttaatatagtgaaatttcgtttttattaaaaatataaaaaattagtcgggcgtggtggtaggagtttgtagttttagttattttagaggttgaggtagtagaatgttttgaattcgggaggcggagtttgtagtgagttaagatcgcgttattgtattttagtttgggcgatagagtaagatttcgttttaaaaaaaaaaaataaaaaataaaaaaatttttttttattttttttttttttttttttttttatttttttttttatttttttaatacgtttttttattttttttttttttttttattttttgtatttgattttcggtatattttagtttttaggttaataaattttttcgcgttcgtcgggagtaggttagggaagggacgcgaggcggcgttgttatcgtattttgagcgtcgtagttttttgggttttttgtattattttagtgaaggttattttagttttttatggaggttaaattaagggtgtaaattaggatttttattgaagtggcgggattttaagaggtttttttttggttttttagttgtgggtttttttgcgggcggcgtagtcggtttttattagaatcgtttagaggcggacgttgtttttttggggtgacggagtagtaggaagcgttttcggattttggaatacgtgggcggttcgtgggaggggttgaggcgtagttttttatttattcggattcgaatttttcgcggtgttgttttaagagagtcggattttagattacgttttagttcggattcggaatttttgttttgcgggtttgtatttttataacgggtaggtgtgagtgttttgtagttggagattagaagtttgaaggtagttcggttttttttagtttatagcgtcgttatttcgtttttatattagtaaatatattttatttttcgtagattagggcggggtgacgggtgattttagttttcgtagtgaatttcgggtagtaaaatttaaaatatatgcggttaaggtcgggtacggtggtttacgtttgtaattttagtattttgggaggtcgaggcgggcgattatttgaggtcgggagttcgagattaatttgattaatatggggaaatttcgtttttattaaaaatataaaattagacgggtttggtggtgaatgtttgtaattttagttagtcgggaggttgaggtaggagaatcgtttaaattttggaggcggaggttgcggtgagtcgagatcgcgttattgtattttagtttgggtaataagagggaaaatttcgtcgtaaaaattttcgggggcggagcggagtttcgttttgggttatgtaagcgatcgcgttgggtcgtttttttttttttttcggattttgtagtggcgtttaaagtttgagagagggaagtcgtttttgtgttcgtgagtgtatggggtataaggtaagtgttgagggagaaaacgtagttgatggggtagagtagacggggttggaggtggggtggagggggagggttttggatagaagatttgggaggtttggtgggggaggggcgtttaggtttgggtattaagaaataagttttttggagtttaagattatttcggttttttttagtttaagagaggattggttttatgattttttgaaattatttttaaatgttttagaataaattttgtatatttattattgttattgaattattaaaagttttttttgggggcgagttgaattagattttttgttggagttggtatacggaggaagttttggagggagggtagatatcgtggaggtaagggtttgggatttgtgttaggagagttaggtttattttttttttagttttttattaggtttatgatttttagtagtgaaaataatttttttaaggtggggaaaggatttcggtttttgttgtgtttaataaattatgaggattaaaataaattattagtgaatgtgaatgggaaaattaagaaattgttaaaattttcgaatatattatatttttatttatagaaaagtgtaggttagggattatgggggaatagttagtaatgatagggatagttgaatttaaaaaaaaagtttgtgaggttgataaagaagaaacggatatattttttgattttggagggtttatagggtagaagatggtagatgatagttgggtgtggtggtattcgtttgtagttttagttatttaagaggttgtggtgggaggattgtttgagtttaggtatttaaggttgtagtgagttataattatgttattgtattttaattgagtgatatagtaagattttttttttaaaaaaaaaaaaaaaatttatggtagggtataatgagtattattaggaaggtttaaattacgggttaaattagtagttttaaaatttgattatatatcggaattatttagggaattttaaaagatattaagatttaggtttaatttgggtttattgatttaataatttaggttgtggttgtggtttgggaatatggatattaaaaattttttaggtggttttacgtagtggttaggtttgatgatttttgtttagatgttttaacgattaagagatgtgcgttggggataaggtaatttttttagtagaaagaggttttcgggatagtatttttattattgagaattgagaatttatatgttatataatttatttttttaaagtgtgtagtttagtggtttttagcgtaattataaggttgtgttatcgttattattgtttattttggaagatttttttttttttttttttttttttttttttttttattttaaaggttagttaagtgaaatagtgggagtgaagaagaaataaagatatttataattggttgtgattaattagttgtaaatattgtatttagattagtttgggaagattttaaggatatggtggtggtttgatgggttttaaggtagaggttataatagtttggaagagggagattgtttaggtagtggtattttggtgggatagggtgaggagattttagagtttacgtttattgtaattttggggagatgttattagagaaatgggggtggtgttagatagtagattgtggtagttgaggttttttacggtagagtagaagtatttattatgtgtgatatttagtagatggggcgttgtgggtggtttggagtattttggttgtaattgaggtaggtatcgtgtttaggaaggttgtgtagtaatttaggttgaagggaggggaaagtttagattaagattgtggttgtgggattgaaatagcgttgaaggagttgattttgattttcggagatgatggggaaagaggaaattagaagggattaaggatggtgatgtttttaagagaaattgaggaggaagagaggatgatatggtggtagacgtatagagagtttttgtagattttttatattggaggggattatggtcggaggtatagatgttttaaggtaggttggaaaagggagtttggagagagtttggtgttgtagtgaattatagggagtcgtttttttggttttgtgattatttagggattgaatagagaggcggttttgggagattttagatatttagaggatataagggggtgaaaggggggtttggttttgagttaaagggaggagaaggagattataaagttgaaacgtttaagagagtttgtggtttgagcggttttattgcggtaggtgtttttgagaggtagaggtggttgagatttggaaataggtttgtaaatttggttattggttttattgttagtaacgttgtgcgcggttgagggagtgtgttgggagaatagttacgcgttgtttgttttggaaggaataagttagtgagagtcggtttaatggggcggtcggcgaaaggggtttggtgaggttcgcgtttttcggggtgggggcgcggggatgggtggtcgcgatgtcgggagggtaggtagggttttggtcgtgtttatgaagttggagttgtatttttagttattcgaagttggtttttgttttaggttgcgttttcgcgtgttttttattttttgggttttaggtttcgttttttaaatttttttaggtttttagtttattggaatttttttttttaagcgtggtttcgtttttttcgttcgtgattggttttaagtttcgggttttagttttattggatgagcggtcgggggatcgggttaggtgattaagttttcgcggcgtttttttttcggttattgtttgagtcgttgagagggtggcgacgtcggggttatggggttgggttcggtttttttgtttttggttggtatttttttttttgtattttcgggagttgttgttggtgagtggcgtttttggcggttttcggcggagcgggagtagtgggacgttttcgggggtcgggtgggtagcggcgagcgttgtgcggttagggcggggtttttgtgttttgtcggtggcgtagggagttggacgcggttcgttatcgttatattttagttttgttttttcgttattttttagtttttttcgggatcgcgtattatttgtattttttggtttttttttgtttttttttttttcgcgtttttttcgtttttttttatttttcggataaattagtttttttgaggtttatgggttttcgggttgttttcggggttgtttttgtgaatggtattcgagtgtttttttaacgcgggtattgaagtagttataattttcggtgtttcggggcggttttagtttttggagttttgttttttttcgga

SEQ ID NO: 180 - DNA, 5539 bp, Artificial Sequence
  chemically treated genomic DNA (Homo sapiens)
ttcgggagaggatagaattttagggattgagatcgtttcggagtatcgggggttgtggttgttttaatgttcgcgttggaagggtattcgaatgttatttataggagtagtttcggaggtagttcgggaatttatgggttttagaaggattggtttgttcgaaaagtgagaggaagcggaggagacgcgaggagagaaagagtaggaggagattagaaagtgtaggtgatgcgcgatttcgaggaggattgaaaagtgacggggaagtagggttgaagtgtggcggtaacgggtcgcgtttagttttttgcgttatcgatagggtataggagtttcgttttgatcgtatagcgttcgtcgttatttattcgattttcggaaacgttttattgttttcgtttcgtcgaggatcgttaggaacgttatttattagtagtagttttcggaggtgtaaaagggaagatgttagttagaagtagaaagatcgggtttagttttatggtttcgacgtcgttatttttttagcggtttaagtagtggtcggggagaaggcgtcgcggaaatttagttatttggttcggtttttcgatcgtttatttaatgaaattggggttcggaatttagggttaattacgagcggagagggcggggttacgtttggaagagaaaattttagtgggttggagatttggggagatttagaaggcgggatttggggtttagaaaatggggagtacgcgggagcgtagtttaaagtagggattagtttcgagtagttgagagtatagttttaattttataagtacggttagggttttgtttgttttttcggtatcgcgattatttattttcgcgtttttatttcgaggagcgcgggttttattaagtttttttcgtcggtcgttttattaaatcggtttttattggtttgttttttttaggatagataacgcgtggttatttttttaatatatttttttaatcgcgtatagcgttattggtaatgagattagtgattagatttgtagatttgtttttagattttagttatttttgttttttagaagtatttgtcgtagtagaatcgtttagattataaatttttttagacgttttagttttataattttttttttttttttttgatttaaagttaggttttttttttatttttttatattttttaagtgtttgaagttttttagggtcgtttttttatttagtttttgggtgattatagggttaaggaggcggttttttgtggtttattataatattaagttttttttagatttttttttttagtttgttttaggatatttgtattttcgattatagttttttttaatgtgagagatttataaagattttttatacgtttgttattatattattttttttttttttttagttttttttaagaatattattatttttggttttttttgattttttttttttttattattttcgggagttaaagttagtttttttaacgttattttaattttatagttataattttagtttaggtttttttttttttttagtttagattattgtatagtttttttaaatacggtgtttgttttagttataattagagtgttttaagttatttatagcgttttatttgttgaatgttatatatgatggatgtttttattttatcgtggaaaattttagttgttataatttgttgtttggtattatttttatttttttggtgatatttttttagggttgtagtaaacgtgggttttgggatttttttattttattttattaggatgttattgtttaagtagttttttttttttaggttattgtaatttttgttttggaatttattagattattattatatttttaaaatttttttaggttggtttgagtgtagtgtttataattaattgattataattagttatagatgtttttgttttttttttatttttattgttttatttgattagtttttaaaataaaaagaaaagaaaaaagaaaaaaaggaaaaaaaattttttagggtagatagtggtgacggtggtataattttgtgattacgttagaagttattgagttgtatattttaaaaggataaattgtgtggtatatgaatttttaatttttaataataagaatgttgtttcgaaagtttttttttattaagagaattgttttgtttttaacgtatattttttagtcgttgggatatttaggtagaggttattaaatttagttattgcgtagaattatttggagagtttttaatatttatgtttttaggttatagttataatttaggttgttaaattagtaaatttaggttggatttaaattttagtattttttaaagttttttaggtgatttcgatgtgtagttaagttttagaattattgatttagttcgtggtttgaatttttttgatagtatttattgtgttttgttatgaattttttttttttttttaagagaggagttttgttgtgttatttagttggaatgtagtggtatgattatagtttattgtagttttgaatgtttgggtttaagtaatttttttattatagttttttgagtagttgggattataggcgagtgttattatatttagttgttatttattattttttattttatgaattttttaagattaggaaatgtgttcgttttttttttgttagttttataaattttttttttaagtttaattatttttgttattattaattatttttttatgatttttagtttatatttttttgtggatgaaaatgtaatgtattcgagaattttaataattttttagtttttttatttatatttattgataatttattttgatttttataatttattgagtatagtagggatcggggttttttttttattttagagagattatttttattgttaaagattataagtttagtgagagattgggagggagatggatttagtttttttgatataggttttaagtttttatttttacggtgtttattttttttttaggatttttttcgtgtgttagttttagtaaaggatttgatttagttcgtttttaaaaaagatttttaatagtttaataataataatgaatatgtaaggtttgttttaaggtatttagaaatggttttagggagttatgaagttagtttttttttgggttaggggaggtcgagatggttttgagttttaggggatttgttttttagtgtttaggtttgggcgttttttttttattaagttttttaggttttttgtttaaagttttttttttttattttatttttaatttcgtttgttttattttattaattacgtttttttttttagtatttgttttatattttatgtatttacgagtatagaggcgattttttttttttagattttaggcgttattgtagggttcggaaaagaaagagaaacggtttagcgcggtcgtttatataatttagggcggggtttcgtttcgttttcgaaagtttttgcgacggagtttttttttttgttgtttaggttgaagtgtaatggcgcgatttcggtttatcgtaattttcgtttttaaggtttaagcgatttttttgttttagtttttcgattagttgggattataggtatttattattaagttcgtttaattttatatttttagtagagacgggatttttttatgttggttaggttggtttcgagttttcgattttaggtgatcgttcgtttcgattttttaaagtgttgggattataggcgtgaattatcgtgttcggttttggtcgtatgtgttttgaattttgttgttcggaatttattgcgaggattgggattattcgttatttcgttttggtttacggaaaatgaaatgtgtttattgatatagaaacggaataacggcgttgtgggttggggagggtcgagttgtttttaggtttttggtttttagttgtagggtatttatatttgttcgttatgaaaatgtagattcgtagggtaggaatttcgagttcgggttggagcgtgatttggaattcggtttttttgaaatagtatcgcggaggattcggattcgggtgagtaggaaattgcgttttagttttttttacgggtcgtttacgtattttaggattcgaaaacgttttttgttgtttcgttattttaggaaggtagcgttcgtttttgggcggttttgatggaaatcggttgcgtcgttcgtaggaaaatttataattaaggggttaggaaaaagttttttagggtttcgttattttagtgaggattttaatttatatttttagtttggtttttatgaaagattggagtgatttttattgaaatgatataaggggtttagggagttgcggcgtttagaatgcggtgatagcgtcgtttcgcgttttttttttgatttgttttcggcggacgcggagaagtttgttggtttggaggttggaatatatcggggattaaatgtagagaatggagaaaagagggaaggatggggggacgtgttgaagaaatgagggaagagataggaagaaaaggggagagaaaaagtaaaggagagtttttttgttttttgttttttttttttgagacggagttttgttttgtcgtttaggttggagtgtagtggcgcgattttggtttattgtaagtttcgtttttcgggtttagggtattttgttgttttagtttttggagtagttgggattataggtttttgttattacgttcgattaattttttgtatttttagtagagacggggttttattgtgttagttaggatggtttcgattttttgatttcgtgatttgtttgttttggttttttaaagtgttgggattataggcgtgagttatcgtattcggtcggagagagaaaatttaaaagacgtagttttattattttttttatttttgttttttatttagttttatttatgaatatttttattataaatttttttttttttaaatttgtaaatatgttgttattattgttattttagagtttgtgagggtaagttgtagatagtatgattttttatttttagatgtgttagggtgtgttttttgggtataagaatagggtttttgttttgttttgttttatataagtaaagtataagttttaaagaggataatatttttaaattattttattgggatatattttgtatgtaataaattgtatttatttaaaatgtttaatttgttgaattttagttgttgtatatatttatatttttattattatagtgaagataaagaagattttaatcgttttttaaagaatagttatacgataaaattttatgttgttattaaaaagagtaagagtaattttaagtattgttatgaaaagatgtgtttagtatatttttaattttttttaaaaggttaaggaggttgggtatagtggtttatatttgtaattttagaattttgggaggttatggtaggtagataatttgaggttagaagtttaagattagtttggttaatatggtgaaattttgtttttattg

SEQ ID NO: 181 - DNA, 6350 bp, Artificial Sequence
  chemically treated genomic DNA (Homo sapiens)
ataaaaagttagttgggtatggatggtatttttagtttttagggaggttgaggtagtaggaatatttgagtttaagagttaagaggttgtagtgagttatgattgcgttatcgtattttagtttaggtaatagagtaagtttttgtttttttttttttttttttttttttttatatatatatatataagttttaaagaaaaaggggtgatggtttgaagatagatgtattggtggtagaaaagaaagtatggaggggtcgggcgtagcggtttatatttgtaattttagtatttcgggaggttaaggcgggtggattacgaggttaggagattgagattattttggttaatacggtgaaatttcgtttttattaaaaaaatataaaaatttagtcgggtttggtggcgggcgtttttggttttagttattgggaaggttgaggtaggagaatggcgtgaatttgggaagcggagtttgtagtgagtcgagatcgcgttattgtattgtagtttcgggggatagagcgagatttcgttttaaaaaaaaaaaaaaaaagaaaagaaagaaagtaagaaagtatggaggaacggaagttaattgtagtattgtaggaaggaggtatgaaatggtttggatttgagtgatagtaacgtaatagaggagtggatttaggaagagcggggtatgatatttattggatttgagatggaagagttagttaggaagtggtaatgatgaaagtttttaattttgttgttttgttgtattgttttgaatagatagggaagttggtaggggaagcgatggtggtttatgggttttagggcgtgagacgagttaaatttagttttgaatgtgattttttttaagaggtaaaatggaatttaaatgaaaatttttaatttattaatgaaagtaatgttttagaatgtaggtgaaaataaatttttttttttatatagtatgattattgttacgttatttgattttgttttttatattattttatatcgtaaatatggtgttatagttgtttgttaaatttttttaaaaatatgttttttcgtagtaagatttgtgttaattattttatttttttagtttttggaatatagtaggtttttaaatgataagtttagtatttaatatttgtgaattgaattggttgatagtaagtaaaattttgttattaaggtaaatagaaaagagaagtgtatttagagttagaaaggtttcgatttaaatttttgtttttttttttttatttttgttagttatataattataagaaaattgttagtttgtattttaggttttttattagtgaaatggatgattaagtttattttgtaggagggtgtgagtgtattaagttaaattaaatatatatatagtgtttgttatttagttggtatcgatattatttattatattatttattattattatttgtatttttatggattttaggttttgttatggtttttatgtttttagtgtatttttttttttttttttaatattttatttaaatagttttgttagatgttgtttttttggtatggttagttagtttttttaaagtttttataggttattaagtttttgtttatacggttggttggttcgttagtttaagttatttaatttaattgatattatgatagtttgtaaattttaaaattattgttggtaatttagatgtggtagtgtttatgtttggtttatgaattatattattacgtttttatttatatgtaatttgtattatgttgtgttgaaagtagttttttagtttagtatttgaaaatattttttagataggtttttatagtaattaaaaaataaatataaaattcgggaaagttatgtttgtgtatttaaaagatatttaagaatatagtagtatagagagtaggttgagttgttttatttaaggatgtgagtttagatttattgatttttttgattgaaaattattatttattgattgaggtattgtatattttattttagaatgaaatgaatttttaagttttatgaattttatatgaatgaatgaaagtgtttttgtaatttttattttttttgtagtttattaaaaataatggtattttttaataggaaaaatatattgaacgttgtatatgtgcgtatgtatatgtgtgtgtagtatatatatatattttattttgagataggtttttattttgttgtatagggtggagtgtagtggtgtgtatagtttattgtagttttaattttttaggtttaagtaatttttttgttttagttttttaagtagttgggattataggtgtgtattattacgtttggttttttttggttttatatatatatgttgtttaagttggttttaaatttttgattttaagtaatttttttgttttggttttttaaagtgttgggattatagaatatttatatttttatatattttatatgtattaaataaatatatgtttgtgataagagagtagtttattatagtttagagattttagaatggggataggttggaaggaggagttatttatttttgagatgatgaagaggattagtgtttattttaggagatattatcgtagttttgaggaatcggttatgggtattagtagggtatagtgttatatttcgttaatgttttgttttttttttttatagtgagttagttagtaagcgtcgtattgttttgggatcggtattgtacgtagaagtgagttttatatttttttttttttatagggagattattttttttattttaagggttttaggtatatttataatggtggtatttgttgagtagtggtttgaataaagggtttttagaaagtaagatgtaatttagagtataggtttgttttttagggtatttagttttaggaatgtttttggggaatgatttgtagttttttagtgaaagagagaataaaagaaagttttagtaggcgagttgggtagtagagagttttgtaattttattttggtaagtattatttgtaagaacgaattgggataaggtaaataaaatattgtttaaaagaggtttgtttaaagaagttagaatacgttttttatttatttttaaattatgttttttaaatattaagtaatttgtagtattttttgtcgttattaaaaaaaaagagagaaatattttttttttttttatttattgtagaattaattttatagtggttttgtagttaatttttttagtatattataaatttaaatatttaaaaaaatttgtgtttttttaattgttattaaattacgagaagattgatttatatagtttttttttattttttttggcgggtaagtatttagttttgttcgttattaatattgaaataatagtttttgaattgagtgatttttttagaaaggttaaggtgatcgaatttgaatattttttttatgttttggatacgaagttttttgttgcgtagatagttttattttttttattttaaggttaattgtacgaatttttttggaaaataggatttatggtattttttagataaattatcgtgaattttgtattgtgtattgttgttttaaaattaatatataaatttattgtcgttaaagattttgttatttgtgttatataattgttttttatttgaatttattaattaaattggggtttttaagtaatatttaattaattttttaattggtttatattatatttttaatgatttttattagggtaaaaattattgattattgagttttattttgaaattacggacgtcgagtttttttttttatttagaatttttagattttgtttaaaaagttgggtgtggttttatggggggagggggaagagcgagaggagattagagggacgggggcggggattttgtaagaaaaattttttcggtgtaatcgtgatttgggaggtttacgtatggcgtttttttaaaggttgtagaagttttttgttaataaaaagttcgtatattcgagtaaagataggttttagcgagttattaaaaatttaggggcgtttttgttttttatagggttcgatcgtatatagtaaggcgatggtttagttgtaagttggtagtattgagaattagtagcgcgcgcggagttcgttgagatttgaattaatttggtttaacggttttttttaaatcgttaggagtttttaatcggcgggatagtagggcgcggtgagttatcgtcggtgattaagcgattttatttttttttttcgggtttttttttgttatcgtcgtttcgtaattttcgtcgttcgaagttggattgagttcgttaggtttttcgatagaattttttttttttttaatattttttcgttaaggtaagtcgatggatagaggcgcgggtcggagtagtttttttttttaagcgggcggcgcgcgaggttgcggcgaggtttgagttttgcgtttttgcgttgtgcgcgtttttatttcgcgttttaattttaggcgttttttgttttttttttcgcgattttagatttgagggattttttattttttttttttttcgtttttttgttcgcgggttttttcgtttgatcgtagtttcgagatcgtcgcgtatttttttttacgtttttttggcgtggtgttatcggatttttttggtttagttttaggcggattttttttttatcgcgcgatttcgttttttttagtattttagggtgagtttagtttagattattattcggaaagtttttaaaagttttagtttagcgttgaagtaacgggattatgtttagttttaggtttcggagtaggaaggttcgagggcgtttttattttattcgtttatttttttcgtttttcgttaggtttttattggttggcgcgtttcgcggttgggatggtagtgggaggggatttttttttttaacggggttataaaaatagcgttttcggcggggtttagttttttgttattttcgtttcgaggttttcgcgttagagacgtagtcgcgtttttattatttatatttatcgcgttttcgttcgtttttttttcgggagttagttcgcgttatcgtcgtcgtttaggttatcgttatttttcgtagttatgtttattaggttcgtgttttcgtttttttatcgtaggatgttcggcggttcgggtatcgcgagtcggtcgagttttagtcggagttacgtgattacgtttattcgtatttatagtttgggtagcgcgttgcgttttagtattagtcgtagtttttacgtttcgttttcgggcggcgtgtatgttacgcgtttttttgtcgtgcgtttgcggagtagcgtgttcggggtgcggtttttgtaggattcggtggatttttcgttggtcgacgttattaatatcgagtttaagaatattcgtattaacgagaaggtggagttgtaggagttgaatgatcgtttcgttaattatatcgataaggtgcgttttttggagtagtagaataagattttgttggtcgagttcgagtagtttaagggttaaggtaagtcgcgtttgggggatttttacgaggaggagatgcgggagttgcgtcggtaggtggattagttaattaacgataaagttcgcgtcgaggtggagcgcgataatttggtcgaggatattatgcgttttcgggagaagtaaggttgcgtttatgtaagtagttgggtttcgggagggggttggagggagaggggaacgttttttcggttttcgcgagagttgttacgtttttggggatgtggtcggggggaggtttgttagggagatagcggagagcggggttgtggttgtggtggcgtagtttcgtttagaatttagattttgtagttcgtatttttttttttgtttttatatattgtttaaggacgtttcgttttaagttatagattttttaaaattattattttgtgtgtagttgaaggtttttgggtataatgagagttagttttttaaatttttagaaagttttttgttttttttggtaggttgttaattatcgggcgggagaaggaaggaggggaaggcggtggagggagcgagataaagggatggtttttcgggggcggggatggcggggttgttttgtaggtttgtgcggttatcgtgattgtttttttgcgcggtgttcgaagtttcgttgaaatttgtcgagggtagtaggtttgaaagttgtaggcgttagttgcgcggaggtggcgtagttgttttggaggcgtagagcgaatacgtggtgtttgggtgtggtcgtttcgtttttggcggttttttcgtttttttttggttaatgcgtaattgttttaga

SEQ ID NO: 182 - DNA, 6350 bp, Artificial Sequence
  chemically treated genomic DNA (Homo sapiens)
tttgaaatagttgcgtattaattaaaggggaacgaggaaatcgttaggggcggggcggttatatttaaatattacgtattcgttttgcgtttttagagtagttgcgttattttcgcgtaattagcgtttgtagtttttagatttgttgttttcggtaggttttagcgggatttcgggtatcgcgtagaggggtaattacggtggtcgtatagatttataggatagtttcgttattttcgttttcgagggattatttttttgtttcgttttttttatcgtttttttttttttttttttttcgttcggtgattggtagtttgttagaaggggtaggaaattttttgaaagtttggaggattggtttttattgtgtttaagggtttttaattgtatataaagtggtagttttaagaaatttgtaatttgaaacggagcgtttttgggtaatgtgtggggatagaggaggaaatgcgaattgtaaggtttgggttttgggcggggttgcgttattatagttatagtttcgtttttcgttgtttttttggtaggttttttttcggttatatttttaagggcgtggtagttttcgcgggggtcgggggggcgtttttttttttttttagttttttttcgaggtttagttatttgtatgggcgtagttttatttttttcggaggcgtatgatgttttcggttaggttgtcgcgttttatttcgacgcgggttttgtcgttggttagttggtttatttgtcggcgtagttttcgtatttttttttcgtagaggttttttaggcgcgatttgttttggtttttgagttgttcgagttcggttagtaggattttattttgttgttttaggaagcgtattttgtcgatgtagttggcgaagcggttatttagtttttgtagttttattttttcgttggtgcgggtgtttttgaattcggtgttgatggcgtcggttagcgagaagtttatcgagttttgtaggagtcgtatttcgggtacgttgtttcgtaggcgtacggtagaggagcgcgtggtatatacgtcgttcggggacgaggcgtagaggttgcggttggtgttggggcgtagcgcgttgtttaggttgtaggtgcgggtggacgtagttacgtagtttcggttggagttcggtcggttcgcggtgttcgggtcgtcgaatattttgcggtaggaggacgaggatacggatttggtggatatggttgcggagggtggcgatggtttgggcggcggcggtggcgcggattggttttcggagaagaggcgaacgagggcgcggtgggtgtgggtggtgggagcgcggttgcgtttttggcgcggggatttcggagcgagagtggtagaggattggatttcgtcgagggcgttgtttttataatttcgttaggaaagagggtttttttttattgttattttagtcgcggagcgcgttagttaatagggatttagcgagaagcggggagggtgggcgggtggggtgggggcgttttcgagtttttttgtttcggggtttgggattgggtatggtttcgttattttagcgttgggttgggatttttgggggtttttcggatgatagtttgagttgggtttattttggggtgttgaaaaaggcggggtcgcgcggtgaggggggggttcgtttgggattgaattagaggggttcggtggtattacgttaaaggggcgtgggaggaggtgcgcggcggtttcggggttgcggttaggcggggagattcgcgggtaaaggagcgggaagaggaaagagtaaggaattttttagatttgaagtcgcggagaaagaaataaagagcgtttgagattggaacgcggggtgggggcgcgtatagcgtaggaacgtagggtttaggtttcgtcgtagtttcgcgcgtcgttcgtttggaaaggggggttgtttcggttcgcgtttttgtttatcgatttgttttggcggagagatgttggggggaggggaggttttgtcgagggatttaacgggtttagtttagtttcggacggcgggagttgcgagacggcggtggtagaggaaagttcgagggagaggggtggggtcgtttagttatcggcggtgatttatcgcgttttgttgtttcgtcgattgagggtttttagcggtttaggggaaatcgttagattagattgatttaagttttagcgggtttcgcgcgcgttgttagtttttagtgttattaatttatagttgggttatcgttttgttgtgtgcggtcgggttttgtgggggataagagcgtttttaagtttttaataattcgttaaagtttgtttttgttcgaatgtgcggattttttgttagtaagaaatttttgtagtttttggagaggcgttatacgtgggttttttagattacgattgtatcgggaaggttttttttgtagagttttcgttttcgtttttttggttttttttcgtttttttttttttttttatgaaattatatttaattttttaaataagatttgaaaattttgggtgaaagaggaaattcgacgttcgtagttttaaaatagaatttagtgattagtggtttttattttggtggaagttattaaaggtataatatgagttagttaaagaattaattaggtgttgtttaaaaattttaatttgattaatgagtttaaatgaaaggtaattatgtaatataaatgatagaatttttggcggtaatagatttatgtgttaattttaggatagtaatgtatagtatagggtttacggtgatttgtttgggaaatgttataggttttgttttttaaaagaattcgtgtaattgattttggggtgagggggataaaattgtttacgtagtaaaaaatttcgtgtttaagatatggagggagtgtttagattcggttattttaatttttttagggaaattatttaatttaagggttgttgttttaatattagtaacgagtagagttgagtatttattcgttaagggagataaaaggagattatgtaaattagttttttcgtgatttagtagtaattgaaaaggtataggtttttttgagtatttagatttatggtgtattgaaaggattaattgtagaattattgtaaaattgattttgtagtggataggagaaaaaaaagtatttttttttttttttttggtggcggtagggggtattgtaggttatttggtatttaagaaatataatttagaggtaaatgaagagcgtattttgatttttttggataagttttttttaggtaatattttgtttattttattttagttcgtttttgtaaatggtgtttgttaaggtggaattataggattttttattgtttagttcgtttgttggggtttttttttatttttttttttattgggaggttgtaggttattttttaagagtatttttggggttgggtgttttggaggataagtttatgttttgagttatattttgttttttgagagttttttatttaagttattgtttagtaaatgttattattgtgagtgtgtttggaatttttagaatgagaaaagtgatttttttatgggaggaagagagtgtggaatttatttttacgtgtagtgtcgattttagggtaatgcgacgtttgttgattgatttattatggaaaaggaggataaggtattggcgaggtgtggtattgtgttttgttggtgtttatagtcgattttttagggttgcggtgatgttttttggaatgggtattggttttttttattattttagggataggtagtttttttttttaatttgtttttattttgaagtttttgggttgtgataggttgtttttttgttatagatatatgtttgtttgatgtatatagaatgtataaaagtgtaggtgttttgtagttttagtattttgggaggttaaagtaggaggattgtttgagattaggagtttgagattagtttaggtaatatatatatatgaaattaaaaaaagttaggcgtgatggtgtatatttgtggttttagttatttgggagattaaggtagggggattgtttgagtttgggaaattgaggttgtagtaggttgtgtatattattgtattttattttgtgtaatagagtgagaatttgttttaaaataaagtatatgtatgtattatatatatatatatatacgtatatatatagcgtttaatgtgttttttttattagaaaatgttattgtttttggtgggttgtaagagaagtgaaagttgtagaaatatttttatttatttatgtagaatttatgagatttaagaatttattttattttgagataagatatatagtgttttaattaatgggtgatagtttttagttagggagattaatgaatttgaatttatatttttgagtgagataatttagtttgttttttatgttattgtgtttttaggtattttttgggtatatagatatagttttttcgggttttgtgtttattttttaattgttatgaaaatttatttgagaagtatttttaagtgttggattgggaagttgtttttaatatagtatgatgtaagttgtatataaataaagacgtggtggtataatttataggttaggtataaatattattatatttaaattattaatagtgattttggaatttgtaagttgttatgatgttagttgaattgggtgatttaaattgacggattagttagtcgtgtggatagaagtttagtggtttatggaggttttgggaaagttggttagttatgttaagagaatagtatttagtaggattgtttggatggaatgttagaaagaagaaggagggtatattgagagtatgaaaattatagtaaaatttaaaatttatggaaatataggtaataataataaatagtataataggtaatgtcgatgttaattgaatgatagatattgtgtatatatttaatttaatttgatgtatttatatttttttgtaagatagatttgattatttattttattaatgaggagtttaagatgtaggttagtaatttttttgtggttgtatgattagtaggggtgggaagaaggggataagaatttgaatcgaggtttttttgattttaaatgtattttttttttttgtttgttttgataataaaattttgtttattattaattagtttaatttataaatattaagtgttggatttattatttagggatttattgtgttttaggaattgaagagatgggatgattaatatagattttgttgcgaaggggtatatttttagaggaatttggtagatagttataatattatgtttacgatgtaaaatgatgtaaaaaataaaattaaatgacgtaatagtgattatattatgtaagaagggagatttgtttttatttgtattttaaaatattatttttattagtgagttaaaaatttttatttagattttattttgttttttaggaggaattatatttaagattgggtttagttcgttttacgttttaaagtttatgaattattatcgttttttttgttagtttttttgtttatttagggtaatatagtaaaataataagattggaaatttttattattgttattttttaattaatttttttattttagatttaatgggtattatgtttcgttttttttggatttatttttttgttacgttgttgttatttagatttaagttattttatattttttttttgtaatattgtaattggttttcgtttttttatgtttttttgtttttttttttttttttttttttttttttttgagacggggtttcgttttgtttttcggggttgtagtgtagtggcgcgatttcggtttattgtaagtttcgttttttaggtttacgttatttttttgttttagtttttttagtagttgggattaaaggcgttcgttattaagttcggttaagtttttgtatttttttagtagagacggggttttatcgtgttagttaggatggttttaattttttgatttcgtgatttattcgttttggtttttcgaagtgttgggattataggtgtgagtcgttgcgttcggtttttttatgtttttttttttgttattaatgtatttatttttaagttattatttttttttttttaaaatttatatatatatatatagagagagagagagagagagagagagataaaggtttgttttgttgtttaggttggagtgcggtggcgtagttatagtttattgtagttttttaatttttgagtttaagtatttttattgttttagtttttttagaagttgggagtgttatttatgtttagttaattttttat

SEQ ID NO: 183 - DNA, 3280 bp, Artificial Sequence
  chemically treated genomic DNA (Homo sapiens)
tagttggtcggttgtagcgttgggtgcgggtgtaggtttaggttttttttttacggttaaattagggggtgttaattttggtttgttttgtgtttttttgtattgtgtgggtgatttatgggttatgggtggttttagatttttgggtataaattgggttttagtagaaagtattttagaggattaggtaggttgggggttagttttgtcgtttatttttagattttgttattcgtttttagttagggagttttttttttgttttttggtttgtttcgttttaggttttgattttttttttgtggagatgtaggggtagtgggggatatagggacgttttgtttttagggtagtttttagggaggtagtgttggggaggggtaggtgagatcgttttttttatcgggtttatagtattattttggtttgaggtatcgtttttaggaagttttttttgagttttgagcgtttgcggttttttgtgtgttgttttttgtggggttttgtagatttagagaggtttagttgtattcgttcggttgggagagttgggtgtggggaatatggtcgggttttcgaggtttttgttgttgtttttgtttttggcgttggttcgcggtttgtttggggttttggttgtttaaggtaagagttttttaggttttttatggttatagtttcggagttttttttgttttatgagtttagagtttttagtttgagttatagtatagtttttaggaagcgggtggggtgttgagcggtttttagtgtttgaggatttatttaagagaaggaaaaagggtggattcggtggggagtggtcggggttgtttaggtagggtcgttgttttgggaggaagaagtttatagtttcggaatacgaggatagtattttttttaatattatagtcggtgtttagatttgttttatgtttcgtaaggtatcgtgtttttggcgatatgttagttttgggttgttttagggttttattatttttattattgttttttgtagggaggatattttttgtttttttggttagattgatggtgatagtttaggttttttttagaggtgtagtagtttttttattgtacgattgttttcgtgggagttttcgttaatattatttgttttattagcgggggtttgcgtgggatttatttgaggtagttcgggttatagttttaagatattatttattacgaggacggggtggtgtttattacggatagacggtttcggggtcgtatcgattttttagggttttaggataatttgattattattatgtatcgtttgtagttgtcggatattggtatttatatttgttaggttattacggaggttaatgtttacggtttcggtattttggttttggtgataggtagggaatgtgtttattttagattttttttttaattttagttgttggttaggttttgtttttttagtttttgtcgtgggatttttttttttatatgtgtttgaattgttttagtttttagtttattgtttttagtagttttttagatagttgtttttttttttttttatagtttttttttgtttcgaattttaaatttcgggggttttaataggttttttatcgggagaattttttttttttttttttttttttagaggaatagttttaaggatggtatagatgttcggacgttttattaagggtttttgttttttttgttttatcgataggtttcgttttttttgattcgtagatagtttttgttttttttgattcgttagtagtttttgttttttttgcggttttggcggtgatttttttttttttcgggttgggtttgggggtggcgtgtgtgttggcgaggatataggttagtgtgagttttagttgttatttgtattttaaagattgtttttttttttgagagtagcgtggggggcgttaaagttttagaggaaaattttggtattcgtcgttttttttgtaggttttggaatttttagggtggaagtggtttcggcggggagggagggggattagtattaaagcgatttgagggggagggagtagtttaggcgttgggttcgcgtgtgcgcgtgtgtcggtgtgtaggtgtgagtgtttgaggggggatttttgaggtttgtgcgtgtaggttggagtgtgcgggtagaggagggagcgtttaggcgtgggttcgcgtgtgtacgtgtgtaggtgtgagtttgtgtgtggggatttttgaggattgtgcgtgtatgttggagtgtgtcggcgtgttgtgtggtcgtgggaaggggagggggttttagatagatatagagtttaggcgtggttatttttttcggtttttgttgtttgtttggggttggagtgggggtttcgtttggtttgggtttggtgggggggtttaagttatttttattttttttttttagaggtattttagggttcgatttagttttgtttggggaaggttttgttgggaattttggggtttaggagatttgggggttagtttagaggagttcgtgggggtttcgtgttaaaattagaaagttgatcggagtggggtggggtttaggatattacgttggttattggttggagacggcggttttgttttttagataaagaaattgtgttcgtggcgggataagaattcggcggtatgtgtggtgtacgaggatatgtcgtatagtcgttgtaatacgttgtttttttttaattagtattagtgatttagtgggtttttgtacgtttcgtttgtggtttttttagtattttttttgttttattatgttttttattttgttatattttttattttgttgtttttttacggttgtagtagagtttgaagggtttagtcgtgtttagttttaagtagatatataggtagtggttaggttttacggtgttttttagtggataatgatgtttttttcgggaagttttttttgtttagtttacgtcgttatcgggaggaagtttgattgttttttggttgtatttttcgattatggttaaggagggtttttttgtgggatgggtttggtacgcggtttttttttgttagtgtcggtttatttattagtaggtttttaatttttaggtagttcggtagaggacgggaggagattagttttttatttagtcgtattagaaataaaggtttttgtgtttttttttttgatttttgtatttattttttagttagtaggagttagggagggagatggttgatatttcggattttttttaagttttcgtttggggttttgtag

SEQ ID NO: 184 - DNA, 3280 bp, Artificial Sequence
  chemically treated genomic DNA (Homo sapiens)
ttgtagagttttaggcggaggtttggggagggttcgaagtgttagttatttttttttttggtttttgttggttgaggaataaatgtagaagttagaaaaggaagtatagaagtttttatttttggtacggttgggtgggggattggttttttttcgttttttgtcgggttgtttgggggttgggggtttgttggtgggtgggtcggtattgataggagagggtcgcgtgttaggtttattttatagaaaagttttttttggttatggtcgggagatgtagttaaaggatagttaggttttttttcggtggcggcgtgggttgggtagggaaggtttttcggaggaggtattattgtttattgagaagtatcgtggggtttggttattgtttgtgtgtttgtttggagttgggtacggttgggttttttaaattttgttgtagtcgtgggaggatagtagggtgaggggtgtggtagggtggggggtatggtggggtagggaaggtgttggggggattataggcgggacgtgtaggggtttattgggttattggtattggttgggggaggatagcgtgttgtagcggttgtgcgatatgttttcgtatattatatatgtcgtcgaatttttatttcgttacgagtatagtttttttatttgaaagatagaatcgtcgtttttaattagtggttagcgtggtgttttggattttattttatttcggttagttttttaattttaatacgagatttttacgggtttttttgggttggtttttaggttttttgagttttagggtttttagtagagttttttttaggtagggttgggtcggattttggggtgtttttgaagaaggagagtggaagtggtttggatttttttattaagtttaagttaagcgggatttttattttagttttagataaatagtagggatcgaggggagtggttacgtttagattttgtgtttgtttgaggtttttttttttttttacggttatatagtacgtcggtatattttaatatgtacgtatagtttttagagatttttatatataggtttatatttgtatacgtgtatacgcgggtttacgtttgggcgtttttttttttgttcgtatattttaatttgtacgtatagattttagagatttttttttagatatttatatttgtatatcggtatacgcgtatacgcgggtttagcgtttgggttgtttttttttttttaggtcgttttggtgttggttttttttttttttcgtcgaggttatttttattttgagagttttagagtttgtagaggaggcggcgggtattagggtttttttttggggttttggcgttttttacgttgtttttaggagagggaataatttttggggtgtaggtggtagttggggtttatattgatttgtgttttcgttagtatatacgttatttttaggtttagttcgaggaggaaggagattatcgttagggtcgtagggagggtagaggttgttggcgggttagggagggtagaggttgtttgcgggttagggagggcggagtttgtcggtggggtagggagggtagaggtttttggtggggcgttcgagtatttgtgttatttttgggattgtttttttgagaaggaaaaaagaaggaagggattttttcggtggagaatttgttagagttttcggggtttgggattcggggtagggaaaggttgtggaggggaggaggggtagttatttaggaggttgttgggggtagtgggttgggagttggaatagtttaggtatatgtaggagggagggttttacgataagggttgggggagtagagtttggttagtagttggggttgggaggggggtttgggatgggtatattttttatttgttattaggattagggtgtcggagtcgtagatattgattttcgtgatggtttggtaggtgtaggtgttagtgttcgatagttgtaggcggtgtatggtgatagttaggttgttttgggattttgagaagtcgatgcggtttcggaatcgtttgttcgtagtgggtattatttcgttttcgtagtaaatgatgttttggggttgtggttcgagttgttttaggtagattttacgtaggttttcgttggtggagtaggtgatgttgacggaggtttttacggggatagtcgtgtagtggggagattgttgtatttttggggaggatttgggttgttattattagtttggttagaaggatagagaatgttttttttgtaggggatagtggtggggatggtggggttttgagatagtttagggttgatatgtcgttaaagatacggtgttttacggggtatggagtagatttgggtatcggttgtggtgttgggggaggtgttgttttcgtgtttcgagattgtgggttttttttttttaaagtagcggttttgtttggatagtttcggttattttttatcgggtttatttttttttttttttttaaatgagtttttagatattggaggtcgtttagtattttattcgttttttgggggttgtgttgtggtttagattgggggttttgagtttatggggtagggagagtttcggagttgtggttatggagagtttgggaagtttttattttgggtagttagggttttaggtaggtcgcgagttagcgttagaagtaggggtagtagtaggagtttcggaggttcggttatgttttttatatttagtttttttagtcgggcgagtgtagttgagtttttttgggtttataggattttatagagagtagtatataggagatcgtaggcgtttagagtttagagagggttttttggaggcggtgttttagattagggtggtgttgtgggttcggtgggaggggcggttttatttatttttttttagtattgtttttttgagagttgttttgagagtagggcgtttttgtattttttattgtttttgtatttttatagggaggaggttaaggtttggggcggggtagattagaggatagagaagggattttttggttggggacgggtggtagggtttggaagtgagcggtagagttggtttttagtttgtttggttttttggggtattttttgttgggatttaatttatgtttagaaatttggagttatttatgatttatgagttatttatatagtgtagaggagtatagggtaggttagaattggtattttttggtttggtcgtggggaaggagtttgggtttgtattcgtatttaacgttgtagtcgattagttg

SEQ ID NO: 185 - DNA, 922 bp, Artificial Sequence
  chemically treated genomic DNA (Homo sapiens)
agttttttcgtcgggttggaaggcgataatcgcgaaaaaggagggtgatttttttcggcgggggtttcgggtgatattatattttttaaatgcgaaattaggtttcgggtcggtcgaagggcgtaatttttttttttcggcgttttatcggttttcgcgcgttttttttcgcgttcgagtttcgagttaagtagcgttttggggagcgcgttatggttttattagtgatcgttttgtttttgtcgttggttttgttgtttcgtgagtttgagacgttcgggaaggtaggggatggggcgggcggggggcgggggcgcgggattgcgggtttagtttcgttgtttgtcgtttgtagacgtcgttaggtcgagttagtttcgggtgtcgtcgttggatcggatttggaatttgggcgagatagtggagttgaagtgttaggtgttgttgtttaattcgacgtcgggttgttcgtggtttttttagtcgcgcggcgtcgtcgttagttttattttttttttatattttttttaaaataagtttaaggcggtcgaggggttggatatttagcggttttcgggtaagaggttgggggatattttcgtttttattttgagcgattttcgtcgagagaacgagggttattatttttgttcggttttgagtaattttattatgtattttagttatttcgtgtcggtttttttgttaggttcgacgcgtcgggttgcggtattttttcgcgtggggtttggggtttattttaatttgttttttatatttgggttttgtttttaagttttttagcgtatttggaagcgatttagatattgtttttattttatagatatagtaaattgaggttaacgcgaggttgagtagggattggggatggttttttacgttcggtcgatttggattcgag

SEQ ID NO: 186 - DNA, 922 bp, Artificial Sequence
  chemically treated genomic DNA (Homo sapiens)
ttcgagtttagatcggtcggacgtaaaaagttatttttagtttttatttagtttcgcgttagttttagtttgttgtgtttgtgaaatgggaatagtatttaagtcgtttttaggtgcgttaagaggtttgaaagtagggtttaggtgtggaaaataggttgaggtgaattttaagttttacgcggagaggtgtcgtaattcggcgcgtcggatttggtaggaagatcggtacgaagtggttgaagtatatgatggagttgtttagggtcgagtagaaatagtagttttcgttttttcggcggaagtcgtttagggtgaggacgaaggtgttttttaattttttgttcgagaatcgttgggtgtttagtttttcggtcgttttgggtttgttttgggagaggtataggaggaaggtgggattggcggcggcgtcgcgcggttggaagagttacgagtagttcgacgtcgggttggatagtagtatttggtattttagttttattgtttcgtttaggttttaggttcgatttagcggcgatattcggaattggttcggtttggcggcgtttgtaggcggtaagtagcgaggttgagttcgtagtttcgcgttttcgtttttcgttcgttttattttttgttttttcgggcgttttaaatttacggagtagtaaggttagcggtaggagtaaggcggttattggtaaggttatgacgcgttttttaggacgttgtttggttcgaagttcgggcgcgaggggaggcgcgcgggagtcggtggggcgtcgaggggggaaagttgcgtttttcggtcggttcggagtttgatttcgtatttggaggatgtgatgttattcgaagttttcgtcgaggagagttatttttttttttcgcggttgtcgttttttagttcggcgaggaggtt

SEQ ID NO: 187 - DNA, 1984 bp, Artificial Sequence
  chemically treated genomic DNA (Homo sapiens)
  unsure (9, 17..18, 33, 41, 49..50, 52, 54, 62, 80, 84, 127, 157, 159)
  unsure (175, 207..208, 214, 1181)
agttttagntattattnntatttttattaatgnttttgggnttataggnngngnttttttgnttaaatagtagttaatgnaggnattttaaaaggtatattattttatatttatttagtggttatgntattatttaatttttattataattttgtgngnttagtataatttgtgnttttattttatttgtgaataaatggaggtagnnntttgngtaatttataagtaagtggtagattcgggggttgtgtttagataatgtggttttagattttttgtttttttttgttttttgttgtattttgattgagtttagttatttatttttttaatatatattaattgttgtttttatgttttaggttttgtgttagatgttagaaatatatttttatttattggattttggtatggtttattgtttagtgttttgttatgttacgtgttatataatgtatttatttcggtatttagtttatggaaaataatgttgaaagatattgtatgtatgtttttataataaaattatgtaatttatgttttttttattgttttggttattaggaagtttttatttaaattagagtaaatatattagaatttgggtttgttattttagtttgttgaatttttttttttggtttagattttttattttggtttataaattttattgtataaatgttttttattgtaaaatattttaaattttttttaagggaaggttgtatggaaatgatatagtaaggttttttttgtatttttttagatttttattagggaaggtagatttagatgttttttttatttttagttttaaagttttttatttataaaattttttaagtagtgattattgttgttttgagtatttggaggtagtttagagtttttgaaaggtaaaatttatatataaaaagaagtttttttcgatttagattttagttttggtgttagatgtatatttgaggagtaggtggttagttagatttttatttgagtagttaataaaatttattgttttttaatggaattttttttgtaagttcgaattgatttgttatttttgtgatttgtgagatggtagggaagtattaaatattattatgatttgggttatagtggtgggaaaaaaggaaaaaagaaaaaaaaaatttattgttaagttttgttaggcgtanaaagggttggaattgttggggttattttatttgatttattggaaatagagtggattttattaatattttaataaagagaatttttttgtattaggttggaagtggtcgttagtttttcgtgtaattttattttttggaaaagtggaattagttggtattgtttagcgtgatttgtgaggttgagttttaatagtttaaagaagtaaatgggatgttattttcgcggggttcgtttttcgcgaggtgtttatttcgtatttgttatgtaaaacgagggagcgttaggaaggaattcgttttgtaaagttattggttttggttattagtttttatttaatgttttcgtgatgttgttgttgatttatttgggaagttggttggttggcgaggtagagtttttttttaaagtttggtttttacggaaaatatgtttagtgtagtcgcgtgtatgaatgaaaacgtcgtcgggcgtttttagtcggataaaatgtagtcgagaatttcgttcgttttgtgcgtttttttgttttaggtagggaagaggggttgtcgggcgcgttttgcgtttcgtttttgtattcggatcgttcggtacgggtagggtgagggggttttcggggggtcggggttttcggtcgcggcggcgaagatagatcggggttcggtagggaggttatttcgagtttagagattttaggtattttttatatataggtttttattttggcgtgcgtgcgtgtgtgtgtgtgtgtgtgtgtgtgtgtgtgtgtgtgtgtgtgtgtgtacgttcgttaacgggagga

SEQ ID NO: 188 - DNA, 1984 bp, Artificial Sequence
  chemically treated genomic DNA (Homo sapiens)
  unsure (804, 1771, 1776..1777, 1810, 1826, 1828, 1858, 1901, 1905)
  unsure (1923, 1931, 1933, 1935..1936, 1944, 1952, 1967..1968, 1976)
ttttttcgttaacgaacgtatatatatatatatatatatatatatatatatatatatatatatatacgtacgtacgttagagtgggagtttgtgtgtggggggtgtttaggatttttgggttcggaatgatttttttatcgagtttcgatttgttttcgtcgtcgcgatcggaggtttcgatttttcgaaagtttttttattttgttcgtgtcgggcgattcgaatgtagaaacggggcgtagagcgcgttcggtagttttttttttttatttgggataggagaacgtatagaacgagcggagttttcggttgtattttgttcgattagaagcgttcggcggcgtttttatttatgtacgcggttgtattgagtatatttttcgtgggagttaggttttgaggagaggttttgtttcgttagttagttaattttttaaatagattagtagtagtattacgaaagtattgggtagaggttgatgattaggattaatggttttataagacggatttttttttaacgttttttcgttttgtatggtagatacggggtgagtatttcgcgaggagcgagtttcgcggaggtggtattttatttgtttttttggattgttggggtttagttttataaattacgttgggtaatgttagttgattttatttttttagagaatggaattgtacgggggattggcggttatttttagtttagtgtaaaaagattttttttattaaaatgttaataagatttattttatttttaataaattagataaaatggttttagtagttttagttttttntacgtttggtaaggtttggtagtggattttttttttttttttttttttttttttattattgtggtttaagttatgatggtgtttggtgtttttttgttattttataaattataaagatgatagattaattcgagtttgtagaaaaaattttattaaggggtaatagattttattaattgtttaggtgagagtttgattagttatttattttttaaatgtgtatttggtattaaagttgggatttggatcggaaggaatttttttttgtatatggattttattttttagaagttttgaattatttttaggtatttagaatagtagtagttattgtttaagggattttataaatggggggttttgggattgagggtaagagggatatttaggtttgttttttttaataggaatttaagaaaatgtagggaagattttattgtattatttttatgtagtttttttttagaaagaatttaaggtgttttataataaaggatatttgtgtaatagaatttatgaattaaaatagaaaatttgggttagaaggaaaagtttagtaaattgaaatgataagtttaaattttaatgtatttgttttgatttggataagagttttttgatagttaaagtaataaaagaaatataagttatatagttttgttgtagaaatatgtatataatgttttttagtattattttttatgggttaaatatcggaataaatgtattatgtaatacgtaatatagtaggatattgagtaatggattatgttaagatttagtggatggggatgtatttttagtatttggtatagggtttggaatatggagatagtaattagtgtgtgttaaagaaatagatggttagatttaattaagatgtagtagaaggtagggaggggtaaggagtttggagttatattgtttaggtatagttttcggatttgttatttatttgtaaattatntaaannnttgtttttatttgtttatagataaaatgaaantataaattgtattgantntataaggttgtggtgaggattaagtgatgntataattattgaataaatataaagtgatgtgttttttaagatntttntattggttgttgtttggntagaaggntntnntttgtggntttaaggntattgataaagatgnnagtgatgnttgaagtt

SEQ ID NO: 189 - DNA, 8662 bp, Artificial Sequence
  chemically treated genomic DNA (Homo sapiens)
  unsure (1067, 1301..1302, 1304..1305, 1997, 2463, 2530, 7265)
tagtttatatagttgtagtttttaagtgttgggtacgttttaagcgttttataaatatttgtagaaatgaatgaatgacgtatgtatttgtacgtgggtttatatttgtaagaataggttgtttaggttatgaggttcggtgtattatttgtatttttttttataacgggtagtaaagtttttttcgttttgtgttattcggtaattataattttgtttatagagggcggcgtagtggggttgtttcgtcgcgagttcgttttcggggtttttacgtcgtggttttcgggtaggtatcgggtagttggagacgttagagtcggcgggtaaggtgcgggcggtgcgtcgggtcgcgggcgcgtaaggaggggcgagagggtggggaggggcggggtcggcgtttttcgttatttgataaaacgtttgcgagtttttagagaataacgggtttatttagcggtcgcgagttgttcgcgagggggagcggtcggacggagagcgcgatcgtttcgggggtggggtcgggcgtagcggcgagaggaggcgaaggtggttgcggtagtagtagcgcggtagtttcggatttagttcggagcgtagggcggtcgttgtaggttttcgttttttttttcgtgcgttcgtttatggtcgtcgtcgggtagttgtgtttgttttatttgtcggcggggtttttgtttcggttcggcgtagtttttaatttggatattcgggaggataacgtgattcggaaatatggagatttcgggagttttttcggtttttcgttggttatgtattggtaattgtagttcgaggataagcggttgtgagtttttagatttttttatttttattggggcgtcggtttgcgcgcgagttgaggcgagggcgcgttttgttttcgtcggtttcggggagtatttggttcgtgggtcgcgttcgggtcggtcgaggcgtatttagcgtttagcgcgttcggtttttcgttttgattcgtttcgcgcggcgtttttttttatttagttcgggaaggaggataattcgagggttaggttgggtttcgggangagtttatttttttttttgttttaaataaagtgtttttcgtcggttttttttttcgggcgtgtttgttgggatttcgggtaggtggtacgttttgttgagttttacgtgtgtgtttggggttggggtggcgtttagggttatcgtagcgttgttgtgggtttgtagggagcgtagttttaggatggtttaggttttttttaaatttacggtgtatttcgtttttttcgtagatnnnnncgtttcgtataagttggaaagttattttttatgtgttttgtatgatttttttagtaaggcgggggcgttttttaggagatatttttatatgtttttgaaaaaaaaaaaaaaaaagatgggggtgggggcgggaattaattaaatatttgttcgttggattagattagttgagaaaataagtttgagtgatgtgtttagtttttaaagtattcggtcgtattcgagattcgttcggtttttgcgttgggcgggtatagttaaggggttaaagtaaaatgttcgatttgagtttggattttgtaaataaggtttgtaagggataattttttatcgtagcggtaaatttttcgggagaaagaggagatcggtattattggtttttttttttattttttaaatagtgtttggtttttatatgatcggttatttaagtcggagagggtattttggcgtttagtcgttttaatcgttatggggttgtattttttatttgtgttattgaaaaataggttgtagtaataaaaggttttttttttttatttaggttttgagttgaattaaggattttttaggattaatagatcggagaaagtaaagtgtagttatagtgaagagattttgtgtttaggagaggcgaatgggattttagaattggaggaaattttttgattttagcggttaataattttggnattcgtgaatgttgtagtttttgaattttagttagttttttttttttttttgataatatttgttaggtgaagtatagaaattagttgggcgtggggaggttttaggagggtggtttgaggttatatgtttggttagttgtttatattttgtttttttttagaaataattgttgttaagttgtaaatttgaaatgaaaggtttttgttaatttagttaatagatgacgtttattgtttcggaatatttggtgtgtagaatttgagtttgttagtgtagaaatgattgtgggttagtagagggaatttatttttttgggtattttttttttgtattagagttttattgaaatcggtggtttttttgaaatatttgtttaagtaaaaagtgtgaagggaaagtattgggataagaaatattttggtagtggagatttgcgaaacgtgattttgttaggaattcgtgttntgaaggttagtagtatgtttgttaaaatttgttattgttgttgggtttttttggtattagagttgangtaatttttttcgaggtaaggataagtttgtaatggggtttgatgttttttaggaaagttttttttagtagttgatagaggggagaggtttcgtataaggagattgtatgttttttagagtttaaaggtagtgattatattttaaagaggttgtggtttatgttacgtgttgtttatttttatgtttttgtaaagttttattttagttttaggaatagtattggtttttttaggagaattagtatatataggttatagtataggttagttgttaatttttgatagtaaagaatgtgggtgtaaatggtagagttagtaagattgagaaaatttttggattagttttttaaattttatggaaaaatttagtgggggttttttagggatttggtgggagagagatttaagttgagattttttttcggttttttattagtagttgttaatttattttgagttttaatttttttatttgtaaaatggagatattattgtttattggggttattatgaggattaagagataatatgtaaagtgtttaatgtttgtttggtatgggtatttgttgattaaatggtagttgttaatgattatttaaaaagtagtaattgtgtatttattgtgtgttaggtattttataaggtgttttaaatattttgtgattttaagattgtttgagagtaaagttaaaggtggttgtttttgggtaatgatattttaaatttagttatatttatgaaatttatgtttaaagtaatttaattttaataggttttaattagatttataataaaagtgagtttaatgaatagaggattttgaggaaggagaagtaaaatattagatgtatgggacggttagataaaagtacgattatagaagatttattataaatttttgtagtttaaattttttatagtgtttttaattatttagttatattttaaattttagttatgatttttgtagaataatattgtgttagagagttttaaaatatgtcgggtgtttttaaagttttggagattataaaattgaagtagatattataaattttatttaggtttttaggttgtatattaaagaagtttcggattttaaaagattatttaatggttagttaagttggttcgtcgagtgattgaggttagggtttgagtattttggattttttaattttttttaggtagttaagattgagttatttttagaggtggaaggtatgtgatgatgattgtgggtatatttagtttatgaattattatttttagtttttttgggaagagatggatttatatatgattatagggaagaatttagaagaaggagatttataagagatagttttatgaagttattttggatttttgttaatttttatttttttttttttggggtttttttttttgattattattgttttttagaaatgttttaggttcgcggtttgttttgttttgatttttattaggtttgtttttgattttttttagatttgttatgttttattttttaaaattatattttttgaattagagattatttagtttaattgtttttttttatagatgaagaaattgaagttgaaagtttagtttgagtagaattttaatagaatgtggatttgaatttttgatttatgtttatgttatttttaaatggaaaagttagaaatgttttttagatttagagaaatcggtaagtatttgaattttggaagtgtattatattgtgttgatttattaaattgttttttatatgtataggttagggttatttatttaaatattggtgtttggatttttattattgattttattttagttggttttggaataagttttgggttcgtttttttttgtttgtttttattttatttttttttgaaaaagtttagtgaagtgtggttgtagttagttaagaattagagttgtatttaggatgtgtatttaagtatttgtttttttgtatttatttattcggagtgttatgtggtttagggttattttttagggattgttgggttattttgaatgttaagagtagagaaaaagttaaaacgggtagcgagatttataggaagttttaggattttgtaagaaagtagaaataggtaagtttaattttaatataggttggtgtgagattaagtaatgatagggttggggaaaaaaagggttaaagtatttatatggtataaataatttgttggggaagttaggttaaatgtttatataaaaggatttttttattataaagaagtggttattttgtgtttttagttatatagatttttttagtataataatatattgagatttaatttaagtttttataattaaatagtattagaattatggcgtatggttttttgaagatttcggtttaatatattattgtggatagtgagattagtgaattatttggtatttttaagagggatagtgagataaaatagaaaatattgttgtaagtttagatgatagggttaattgtgtttgaaatattgatttagtgttgaattagtttattttaagaatataattatagtttaagaattagtttaaaatttttttattttatattaaagtaatgtttttaatttttttggatgtttgtagtatattgtgtttgataattttgatgttttgtgttaaattgtgatttattatttttaggatatgatttaattttttttaattggattgtaggttatgtgagggtaggggttttatatttatttttttgtttgttagtatttagtatatgttttgtaaatataatagagattgatattatatatttagtttaatttgtgatattaattttttttgttgagggtggagagagggagaaatttttttttttaattttttgtttttttttgtttaggttttggtgttttttgtttttgaggaaacggaatttgtaagtttagtaaagaaattataagatttaatttttggtttttgattttttaaaggcggggggttttagttaagggatttttatgagtgtttgtaaattttatttggtttttgttttaaaggtagattttagaatttaattttagaaatataggttgatttatattgtagtgggtattcgggatttgttgaggtggttggttgttatgaggttggatagagaaggatgattgtggaatagagatttttttgaaagtaatttgataggggtgtgggggttaaatggaagtgtgtagtatacgtgtgaagttatttgtgaattgatagcggtaggtttatttttttaaggatagtaagggaattttggatatatttaattttttcggtaggatggtgggaaggttgtttatttgtttcgggggtgagtttaggagttatagtatgggatttggggatttgtgtagtattttcgttggtttttgggaggatggtaaagattacgtattgtagtagtgggaagtggacgtagttttagttttcggtgtttattttttttttttgggtttgggtataattttggaattaaataattttatatttggaaggaagtttagggttttgaaatttggttggtttttagggtaattatttgggtaattttttataaaagtgtgatttttagtttatttagatttgttacgttagtttttataagtgtgttttaagaagttgtttttaaagtttttttcgtttgagttagattagttttttttttttatatagaaggtagagtgtaatgtagtgattaagagtagagtttagagttaggtaggattaaatttttttttgttattgattagttatgattttgtgtaggatttttaatttttttaggtttttttgtttttagttgtgaagttagtattttcgtatattagaatagttttggtttagagtgagtattttgtgtttgttaaatagatgaggaaattaaggttgtaagaggtgtagtggtggcggtatgtttagtaaatttggtttttaatttgtattttttttgtttttcggtttgtgttgtgtatgtgttttttttttttaggtttggtttttattacgtttaaaggtttggtttttattatatttttttttttttttattttattttttagttgaaaagtgtattttagaagagttatgttttttatttagtagtttttcgtagttattaagttatagataaattttagtgaggttttagtgtttagagatgagtggatagatgggtgtatagatatgacggggtagtgattgtgagttggatatttatggaggtgggtggtgtagttataggttgggtttattgttaaggaatattatttgtttggtttttaggtttttttagatttttatgattttgaaagtatttttatatttttatttttaggaggttggataatttgtataatatttagggtaggtttgaaaacgatttattttttttagttttttgtttggtattaatgtttgttaggaaggagtttgtggattattgatgataaaattgtttaaggttggaaagtatgtgggtaaatatggaagtagtgttttttttataggtttgttaaattggtatttagatttgtaaatattgattttttggaattaagttaaaaggttaattgttaattagttttgaattggggtaggtagatgggttttttattagtgtaggtttttgttaattaataatagggtttgataattattattaaatttgttatttggtttttttgtttagataaataangtaagacgattttaaattagtatatcgatttcgaggttggtatgtttgtagaagattgtttttaggtcgtagtgtggtagtagattttttttagtttagttttatgttagattttaacgttggattttattgtcgttttattttattttaaattggtagaaagattgtttagaaaattaagtttttaaaattaattaaatggtaaagaagattgttttgaattagggggaatgggatgaagtattattaaacgtaagttataaagggtaaaaatttatgatatggagtcgtgggtatttgtttgtatgtttatttgttaagcggttagtatattttgtatgttatataatttgaaatttatttttttgaaaagttattttagatatagtataagaaaagtttttgagagaaatatgttttttaagtttgggagtatagaaataaaaataaattttgtaataatttgaaaggggtatattggttagttgaagagtaaggaagtatttagtaatgtttttttatttaagagttttgtttgttttgttcggtgatattaatgttattgtggtttttttattttgaaaaggaagtttatttgtattgaggtggttttaagtgtgtgtgtgtgtgtgtgtgtgtgtgtgtgtatgatgtaaatgataataaatattttagatttagagggtaagaatgttattgaatttaagtttttttgagttaaataatttttttgtttttgtagaattaggagtttttttttttaggatatgttgttattatgataaagtattgtgatgtaaagttaacgagaggatttttatttaagtgaattatagttaaggggtggaatggttggtttttggtagggatgttttatttagtagtattgagagtttggagttgttttgtttttttttttttttgttgagggtagtaagaaattttttttaggttttatttttttgatatattttgcgggtgatggttttttattggtagtgtgattatgtatgtttttttagaataaaggtatcgaaataataaaagttgtgaaatggaaatgtttataattttataaggttttagagagattagagataggtaggaaaaaggttattgttttttaattaaaggtgttgagaatttgttgattggatttaaggaatttagttttgttacgatataaaatttaagagttttgttttttttttttttttttttttttttttgttgagatagagttttattttgtttgtttaagttggagtgtagcgatgcgattttagtttattgtagttttgatttttttgggtttagtaatttttttatttttgtttttttagtagttgggattgtaagtgtgcgatattatatttagtaatttttttgtgttttta

SEQ ID NO: 190 - DNA, 8662 bp, Artificial Sequence
  chemically treated genomic DNA (Homo sapiens)
  unsure (1398, 6133, 6200, 6666, 7358..7359, 7361..7362, 7596)
taaaaatataaaaaaattgttgggtgtggtgtcgtatatttgtagttttagttattggggaggtagaggtgggaggattgttaagtttaaggaggttaaggttgtagtgagttgaaatcgtatcgttatattttagtttgggtaaatagagtgagattttgttttaataaaaaaaaaaaaaaaaaaaaaaaagaaataaaatttttgggttttgtgtcgtggtaaagttggattttttaggtttaattaataggtttttagtatttttgattggaaaataatggttttttttttatttatttttaatttttttggagttttgtagaattgtaaatatttttattttataatttttattgtttcgatatttttgttttaaagggatatatataattatattgttagtaagaggttattattcgtaagatatattaggggaatggggtttagggaggattttttattatttttagtaagaaggaaagagaatagaataattttaaatttttagtgttgttgaatggggtatttttattagaggttaattattttattttttggttgtgatttatttggataaggattttttcgttaattttatattataatgttttattataatggtagtatattttgaagagaagggtttttgattttgtaaggataaaggagttatttggtttaggagggtttaggtttagtgatatttttgttttttgggtttgaaatgtttattattatttgtattatatatatatatatatatatatatatatatatatttaaaattattttagtataaatgaattttttttttaaaatgaagaaattatagtgatattgatattatcgagtaaagtaaatagagtttttgggtaaagaggtattattgggtgtttttttattttttaattaattagtgtgttttttttaaattattgtaaagtttatttttatttttgtatttttaggtttagaaagtatgttttttttaaaggttttttttatattatatttgaaatggttttttaaaaaagtaagttttagattgtatgatatgtaaaatatattagtcgtttggtaaataaatatgtaagtagatatttacggttttatgttatgagtttttgttttttgtgatttgcgtttagtggtattttattttattttttttaatttagaatagttttttttattatttaattggttttagagatttagttttttaaatagtttttttgttaatttaggatgagatgaagcgatagtgggatttaacgttggaatttggtatggggttgaattggggagggtttgttgttatattgcggtttgagaatagttttttataaatatgttaatttcggaatcggtatgttggtttgagatcgttttgtnttgtttatttaagtagaaaagttagatagtagatttgatggtggttattaaattttgttattagttgatagggatttgtattggtgagaggtttatttatttgttttagtttagggttaattaataattagttttttaatttaattttaagagattagtgtttgtaaatttaaatgttagtttaataaatttgtgaaggaaatattatttttatatttgtttatatattttttaattttaggtagttttgttattaataatttataagtttttttttagtaaatattagtgttaagtaaaaaattaagaaaaataaatcgtttttaaatttgttttgggtgttgtgtaagttatttagttttttagggatggaggtgtgggggtgtttttaaggttatagaggtttaagaaggtttggaaattagataggtggtattttttagtagtaagtttaatttataattgtattatttatttttatgggtatttagtttatagttattgtttcgttatgtttatgtatttatttgtttatttatttttgaatattgagattttattgggatttatttatggtttagtagttacgaagggttgttaagtagaaggtatggtttttttgagatgtattttttaattggagagtggaatggaagaaagggagaatgtgatgaaaattaaatttttaaacgtgatgaaaattaaatttaaaaggagaaagtatatatatagtataggtcgggaagtagggaagatgtagattgaagattaagtttgttagatatgtcgttattattgtattttttatagttttggtttttttatttatttaataaatataaaatgtttattttggattaggattattttaatgtgcgaggatattagttttatagttgaaggtaggaaggtttaggaaggttaggaattttgtataaaattatagttagttaatggtagaaaagggtttgattttatttggttttaggttttgtttttagttattatattatattttgttttttgtgtaaaggagaaaagttagtttgatttaaacgaagaagattttaagaatagttttttggagtatatttatggaaattgacgtaatagatttaggtgggttgagaattatatttttataaaaggttgtttaagtagttattttgaagattagttaggttttagaattttaagtttttttttagatataaagttatttgattttagagttgtatttaagtttagaaagggaagatgggtatcgggggttgagattacgtttattttttattgttgtagtacgtaatttttattatttttttaggagttagcgggggtgttatatagatttttagattttatgttatggtttttaggtttattttcggagtaggtaagtagtttttttattattttatcgaaagagttaaatatatttaagatttttttattatttttgaagaaataaatttgtcgttattaatttataagtgattttatacgtgtattgtatatttttatttgatttttatatttttgttaagttgtttttagaaagatttttattttatagttatttttttttgtttagttttataataattaattattttagtaagtttcgagtatttattgtagtgtaggttagtttgtatttttggggttaggttttaaagtttgtttttagggtaaaagttaggtgaaatttataaatatttatgaaaattttttagttggaatttttcgtttttgaaaaattaaaaattaagaattaagttttgtggtttttttgttaagtttatagatttcgtttttttagaggtagaagatattaaggtttgagtaaggaagggtaaagggttaaagaaagggatttttttttttttttatttttagtaggaagagttgatgttataggttaaattgagtgtataatattagtttttattgtatttgtaaggtatatgttaggtgttagtaggtaaagaaatgaatgtaagatttttgtttttatataatttataatttagttgggagagattagattatgttttaaagatagtggattatagtttagtataaaatattagaattgttagatataatgtgttatagatatttaaaggagttaaagatattgttttagtgtaggatggggaaattttaaattggtttttaagttatgattatatttttaaaatgggttgatttagtattaaattagtgttttaggtataattgattttgttatttaagtttataatagtattttttgttttgttttattgttttttttgaaaatattaaataatttattggttttattgtttatagtaatatgttgagtcgaggtttttaggaaattatgcgttataattttggtattatttggttatgaaagtttaaattaaattttaatatattgttatgttaagagagtttatataattgagaatatagaataattatttttttataataaaggaatttttttatataagtatttaatttgatttttttaataaattatttatattatataaatattttgattttttttttttttaattttgttattatttggttttatattagtttgtgttaaaattaaatttgtttatttttgtttttttgtagagttttaagattttttgtaagtttcgttgttcgttttggttttttttttatttttagtatttaaggtgatttagtaatttttggaagatggttttgggttatatggtatttcgagtgaataaatgtaaggaagtaagtgtttaggtatatattttgaatatagttttgatttttggttagttatagttatattttattgggtttttttagaagggaatggggtggaggtaggtaaagaaggacggatttagaatttgttttaaggttagttggaatagagttaatagtaagagtttaggtattaatatttaaatagatagttttgatttatgtatatgggaagtagtttgataaattaatataatatagtatatttttaaaatttagatgtttgtcgatttttttaggtttgaagaatatttttggtttttttatttaaaaatggtatgagtatgggttagagatttaaatttatattttgttaagattttgtttaagttgaatttttagttttagtttttttatttgtaaaaagaggtagttggattagatgatttttagtttagaaaatatgattttaagagatggaatatgataagtttgagaaaagttaagaataaatttagtaagggttagaatagaatagatcgcgggtttggagtatttttggaagatagtggtggttagagagagagattttaaaaagaagaaaatgagggttggtagaaatttaaaatgattttatgagattattttttatagattttttttttttaggtttttttttgtgattatatatagatttatttttttttagaagagttaagagtgatgatttataggttggatatatttatagttattattatatattttttatttttgggaatgatttaattttaattatttaagagaaattaaagagtttaaggtgtttagattttgattttagttattcggcggattaatttggttgattattgagtaattttttggagttcgaaatttttttaatatatagtttgaaaatttggatgaagtttatggtatttattttaattttatagtttttaaagttttaggaatattcgatatgttttggggttttttgatataatattattttgtaaaagttataattggagtttaaaatgtgattgaatagttaaaggtattatagaaaatttgaattataaaaatttatgataggttttttatgatcgtgtttttatttgatcgttttatgtatttgatattttatttttttttttttaaagttttttgtttattaaatttatttttgttataagtttaattaagatttattaaagttaagttgttttgaatatgggttttataaatatgattgagtttaaaatattattatttaaaaataattatttttggttttatttttaggtaattttagaattatagaatgtttaagatattttgtaaggtatttgatatatagtaggtatataattattgttttttaaatgattattaatagttattatttagttagtaagtatttatgttaggtaggtattaagtattttgtatattattttttaatttttataataattttagtaagtagtaatatttttattttatagataaagaaattaaagtttaaagtaaattaatagttgttaataaaaggtcgagaaggaattttagtttaggttttttttttattaggtttttgaaagatttttattgagtttttttatagagtttaggaagttggtttagaagtttttttagttttattggttttgttatttatatttatattttttattgttaaaggttgataattgatttgtgttatggtttgtgtgtgttggtttttttgggaagattaatgttatttttgaagttggaataaagttttataaaagtatggaggtgggtagtacgtgatataaattatagtttttttaaagtgtggttattgtttttggattttaggaaatatatagtttttttatacggggttttttttttttgttagttgttaagaagagtttttttagaaggtattagattttattgtaggtttatttttatttcgggaggagttgtnttagttttaatattagagaagtttagtagtagtaataagttttggtaagtatgttgttaatttttangatacggatttttggtaaagttacgtttcgtaaatttttattgttaggatattttttgttttagtattttttttttatattttttgtttgaataagtattttaaggaagttatcggttttagtggggttttggtgtagagagagaatgtttaggagaatgaattttttttgttggtttataattatttttgtattaataagtttaaattttatatattaagtatttcgagataataaacgttatttattaattgagttaataggaattttttattttagatttatagtttaataataattatttttgagagaaagtagagtataagtagttggttaggtatatagttttagattatttttttagagtttttttacgtttagttaatttttgtgttttatttagtaggtgttattagaaaaaaaaaaaaaattgattaaaatttaggggttgtaatatttacgaatnttaaagttgttaatcgttgaaattaagaggttttttttagttttaaaattttattcgttttttttaaatataaaatttttttattgtggttgtattttgtttttttcggtttgttggttttggaaggtttttagtttaatttaaggtttgggtggggaggggagattttttgttgttatagtttattttttagtagtatagatgaagaatgtaattttatagcgattaaggcgattaagcgttaaaatatttttttcggtttaaatagtcgattatgtgggaattaaatattgtttaagaaataaaaggagaggttagtagtgtcggttttttttttttttcgggaggtttatcgttacggtggggggttgttttttataaattttgtttgtaaagtttaggtttagatcggatattttgttttaattttttggttgtgttcgtttaacgtaggagtcgagcgggtttcgggtgcggtcgagtattttgggggttgggtatattatttagatttgtttttttagttgatttagtttagcgaataggtgtttggttaattttcgtttttatttttattttttttttttttttttttaaaggtatgtaaaagtattttttaaggagcgttttcgttttgttgggaaagttatgtaggatatatggaaagtggttttttaatttgtgcggggcgnnnnngtttgcgggggagacggggtgtatcgtgagtttgggaaaggtttagattattttggaattacgttttttgtaaatttatagtagcgttgcggtgattttgaacgttattttagttttaaatatatacgtgaagtttagtaaagcgtgttatttgttcggggttttagtaaatacgttcggagggaagaatcggcggaaagtattttgtttaaaatagaaaaaaaagtaaatttntttcggggtttagtttagttttcgggttgttttttttttcgagttgaatggagggaggcgtcgcgcggggcgggttagggcggggagtcgagcgcgttgggcgttgggtgcgtttcggtcggttcgggcgcgatttacgggttaaatatttttcggggtcggcgggaatagggcgcgttttcgttttaattcgcgcgtaggtcggcgttttagtgggggtgggaaggtttgggaatttatagtcgtttgttttcgggttgtagttgttagtgtatggttagcgagaagtcgaagaggttttcggggtttttatattttcggattacgttgttttttcgagtgtttaagttgaaggttgcgtcgagtcgggataggagtttcgtcgataggtagagtaagtatagttgttcggcggcggttatgggcggacgtacggggaggggagcggggatttgtagcggtcgttttgcgtttcgggttgggttcgaggttgtcgcgttgttgttatcgtagttattttcgttttttttcgtcgttgcgttcggttttattttcgggacggtcgcgtttttcgttcggtcgttttttttcgcgggtagttcgcgatcgttgaatgagttcgttgttttttggagattcgtaggcgttttattaagtgacgagggacgtcggtttcgtttttttttattttttcgtttttttttgcgcgttcgcggttcggcgtatcgttcgtattttattcgtcggttttggcgtttttagttgttcggtatttgttcggaagttacgacgtgggagtttcggaggcgagttcgcggcgaagtagttttattgcgtcgttttttgtggatagaattgtggttgtcgagtagtatagagcgagggagattttattattcgttataaagagaagtgtaggtgatgtatcgggttttatggtttgagtagtttgtttttgtagatgtgggtttacgtgtagatgtatacgttatttatttatttttataggtgtttatggagcgtttaaggcgtgtttaatatttggggattatagttgtgtagattg

SEQ ID NO: 191 - DNA, 2186 bp, Artificial Sequence
  chemically treated genomic DNA (Homo sapiens)
gaatttatgttttttggttgttttttttttttgtggtatttttggttcgtttttattgattatttttttattttttttttttttaatattgttgttaaatatttggaagaaaagtgaaaaatttgttttttcgttagtttcggatgttgttagatttttagatgtgggtgttttgttttttagatgagaggtagaacgtgttttagttaggagcgggttggtttagtttggattgttgttttttttgtgaggcggagtgataggatgagagggattgggtttagtaggaagatagtagggcgtgtaggtagaggttttgggtttatagtattttttagttttaggtttagtttttgttatattagggaaatttttggttttgaagtttttattaaaggttttaggtatttaaaagtaattaggagtattttttttttattttttaggtatagatgttgggtaaggaatagagtttaatgtgtttataagatgtttttattgttggcgttttatgcgggaagagttttgtgttattttagtttttttatttttttaagtggtagtttcgttaggttgtattttgttattgttatttgttgaaggttgggtttgggatggattttgggggtcgggtattgtaggatgggtattgggggtgggtattgagtggtaggaatagggaatgagtattattgtattggggtagattttgtttggtagtttggggttttttagagaggtagatttttttagagtttttgttaaaagggtcggtagagggtaatatgtggtagtggaatagtattggagagagttttttggaagagggttagtagagttaagttttgaatatgttaggtagagggggcgagggtattttgggtagagggtgtagtggggagttaggtttggggtgtgtagggaaatgtgtagttttggggtttgtagagaggggaagtaggaatttaggggtgaaagttgagaaattggtttttgggttagtaggggttgaagagggaggttgttgaattggtttgggcgattgttttagagggagtagtatttttttttttgttttttgtgggggtttttggagatttttggatttatagttagggttatagttgtttgttatgattagatatttatatatagatatatgtaaatatttagatataaatatatagaagtaatattcgtagatatatttatatagatatatagatatattacgtatatataaagatttagatttatagagataaatgtagatattcgggttattttttatatagatatagatacggagtatatataggtacgtatagagttttttattacggaggtatttagataatatatataggtgtatatagatttttttttatataaatatagatatagagagatttatagatatatagatatttcgatatagatatagataatatatatagatatatgttgattttcgtttttttttatatggatacggttatagatatagatatagatataggggattttggagagtttaagtttagaggtgtttttagattattttagtttttttggttttaatataatacgtagagtatttggtttatttttttttatttttttaatttacggatttgtagagagtagtagggttttgtgtgggtatgtgcgggtgtgtagatgagtgtgtgtgtatgtgtgtatgtgtgtgttaagtagtggtttttgtttttttttttttttttttttttttaataggtgattgggaggaatggagattttttttttattatttatttttgagtttgaataatgttttttttaggttttaaaatagtttttaagtttagttatattttttatggttttgtttttattgtgtattgtaggggtggggttggggttatgaggtattcgggtaggataaaggtttgggtgaggcggtttatttattttgttttttgtatttttttttttatatttttttttgtatttatagtttttaatggtttttaaaaagttagagtttaagaaggatgatgttaaggtagtttttaaggtagttttagttttcgtatttttttttgagtttgagcgttttaaggaggtcgagtttgatgtttttaagattaaggtggtatggaagttgggtggtggtaataggagtagggtaagtgagtggattt

SEQ ID NO: 192 - DNA, 2186 bp, Artificial Sequence
  chemically treated genomic DNA (Homo sapiens)
ggatttatttatttgttttgtttttattgttattatttagtttttatattattttgattttggaagtattaaattcgatttttttagggcgtttaggtttagggggaggtgcgggagttggagttgttttgggggttgttttggtattattttttttgggttttggttttttgggggttattgggggttgtaagtatagagagggatgtggagagaagaatgtagaaagtagggtaggtgagtcgttttatttaggtttttattttgttcggatattttatgattttagttttatttttgtagtgtataatagggatagggttataaaggatatggttaggtttaggggttattttggggtttggggagggtattgtttaggtttaggaatgggtagtggaggagggatttttattttttttaattatttgttgggaagggggagggagagagggggataaaggttattgtttaatatatatatatatatatatatatatatttatttgtatattcgtatatatttatatagggttttgttgttttttgtaggttcgtaagttgaagaggtgaagaagggtggattaagtattttacgtgttgtgttggggttagaaggattgggatgatttaagggtatttttgaatttaagttttttaaagttttttgtgtttgtgtttgtgtttatgatcgtgtttatgtgggggaaggcggaagttagtatgtgtttgtgtgtgttgtttgtgtttgtgtcggggtgtttatgtgtttgtgggtttttttgtgtttgtgtttgtgtggaggggggtttgtgtatatttgtgtgtattgtttgggtgttttcgtggtggggggttttgtgcgtgtttatgtgtgtttcgtatttgtgtttatgtaagggatggttcgggtgtttgtatttgtttttgtgggtttgggtttttatgtgtgcgtggtgtgtttatgtgtttatgtgagtgtgtttgcgggtgttgtttttgtgtgtttatgtttgggtgtttatatgtgtttgtatgtgagtgtttggttatggtaggtagttgtagttttggttatgggtttaagggtttttaggaatttttataaagggtaagagaaaggatgttgttttttttagggtagtcgtttaggttagtttagtagtttttttttttagtttttgttggtttagggattagttttttagtttttatttttagatttttattttttttttttataggttttagggttgtatatttttttatatattttaggtttggttttttattgtattttttgtttagagtgttttcgttttttttgtttgatatatttaaggtttggttttattggtttttttttagaaagttttttttaatgttattttattgttatatgttgttttttgtcgatttttttggtaggggttttgagagggtttgtttttttgaggaattttaagttgttaagtagggtttgttttagtgtagtgatgtttattttttgtttttattatttagtgtttatttttagtgtttattttgtagtgttcggtttttagggtttattttaagtttagtttttagtagatgatagtgatagagtatagtttgacgggattgttatttggggaggtgggagggttgaggtggtataaggtttttttcgtatgggacgttaatagtggggatattttgtaaatatattgggttttgttttttgtttagtatttgtgtttggggggtgggaaggaggtgtttttggttatttttaagtgtttggagtttttgatagaaattttaaagttagggatttttttggtgtggtaagggttaagtttgaggttgagaggtgttgtgggtttagggtttttatttgtacgttttgttgtttttttattgggtttagttttttttattttgttatttcgttttatagggaggatagtagtttaggttgggttagttcgtttttgattggaatacgttttgttttttatttggagggtagaatatttatatttggaaatttgataatattcgggattggcgggggggtaagttttttattttttttttaaatgtttggtaatagtattgagaaagaaaggggtggggggatggttagtggagacgagttagaaatattataagaggagaagatagttagagggtatgaattt

SEQ ID NO: 193 - DNA, 1541 bp, Artificial Sequence
  chemically treated genomic DNA (Homo sapiens)
ttgtagtttgggcgatagagcgaggttttattttaaaaaaataaaatagaaataaaataaaataaaataaaataaaaaatttgttataggagtggggaggtcgatttttgaagaaaaacggagtattcggtaatattagtgttttaatgtttttgaatttatgtagattttttttgttagagggttttagtgttttaggttaatgggttaatttgatatttagaatattttttttatattagttttttatatatttaagtttttaggtgttgagatatgattttttttatttcgttttttttattttttatttttgaaaatacgggtggaattttaattaaagtttattgtgttggtattttagtaatattatatattaatatttttaagaattaaggttacgtttttatgtaagaaaatattatttaatgacgtttttatattataatatttatataaaagtttggttattttaataaagagattatagattttagaatttataaataggaaaatatttttttcgggttatttttggaaattttttttaaatatcggagtttttttttaatttaagtttttttttattttttttttaggggatttgttgaagggtgttgtatgtttttttgtgggagagtaaattttatagttaggataaaataaataaataaataatatttaaataatatttaggttaacggtaatttttatttttttttaaagttttaatttttcgtatttaaagttttgggttatttttgtgttgtaaggattttagaatcgaaatggagggatttgataattttatttaattaaatttaaaattttgtttttattatttattagttattaaaatatgtaaattgttgattaaggaaggttgggtagtaggagcgtttgcgaaggcgtagggtagaagtgtgaaaagaaattttagtttttttagggagattgcgtgtgaaagagttcggtttttttaaaagttttaggtcgcgttttgtaggttttcgtatttgttttttttgttttttttatttttttgatgttcggtattatttgtggtcggcgtggtggaaggatatagtgaggtttttattttcgtttttcgtttttcgtttttattttagttttattaaaacgaattcgggttagcgtaaggattttcgagttgcgagtgtgttgaggttgggattgttatttatttttcgattagcgcgtgaatcgagttcggttcggttggcgagaaataattttgtaaaaataattatatttagtttggtaattgtttgtttttaggtttgtcgtttagtcgtcgtttatattcgttgtaggggggggggtatagaatttatcgcggtaagaatattttttttagttagtagattataatgttgtaaattaaggattttatttggattttgttttttttgggaattgtaggtatatttttttttttttaaatttttaatttggtttgttaattattttttttttttatttttaggaggaacgttaattaatttgggtggtttacgtgg

SEQ ID NO: 194 - DNA, 1541 bp, Artificial Sequence
  chemically treated genomic DNA (Homo sapiens)
ttacgtaaattatttaaattaattagcgttttttttaggagtaggaggaaggggtaattagtaaattagattgagaatttaaaaaaaaaaaaatgtatttgtagtttttaggaaaaataaagtttagatgagatttttagtttgtagtattgtaatttgttggttgggagggatgtttttgtcgcggtaaattttgtgtttttttttttgtagcgagtgtggacggcggttgagcgatagatttaggggtagataattgttaggttgagtatgattatttttgtagaattgtttttcgttagtcgagtcgagttcggtttacgcgttgatcggagaatgagtgatagttttagttttagtatattcgtaattcggagatttttgcgttggttcgggttcgttttgatggaattgggatgggagcgaggagcggggggcgggggtgagaattttattgtgtttttttattacgtcggttataaatagtgtcgaatattaaggaggtaagagagataggggaggtagatgcggaagtttgtaaaacgcggtttggagtttttgggggagtcgggtttttttatacgtagtttttttgggagagttgggatttttttttatatttttattttacgttttcgtaggcgtttttgttatttagttttttttaattagtagtttgtatattttgataattagtaaataataaaagtaaaattttagatttggttaggtaaagttgttaaatttttttatttcgattttaagatttttgtaatataaggatagtttaggattttaagtgcgggaaattagaattttggagagggatgggggttgtcgttggtttgggtgttgtttggatattgtttgtttgtttgttttattttaattgtgaagtttgtttttttatagagagatatataatattttttagtagattttttgggaaggaggtgggaagagatttaagttagaagaaaatttcgatgtttggaagagatttttagaaataattcgaagaaaatgtttttttgtttataaattttgaaatttgtggtttttttattaaaatagttaggtttttatataggtattatgatatagaagcgttattaaataatatttttttatatggggacgtgattttaatttttaaagatattaatgtataatattattgaggtattaatataataggttttaattaaaattttattcgtgtttttaaaagtagggggtggagaaagcggggtgaaaagaattatgttttagtatttgaaggtttgggtatgtaaggaattaatgtgagaaaggtgttttagatgttaggttaatttattagtttagaatattgaaattttttaatagaggaagtttgtataagtttaaaggtattaaagtattaatgttatcgggtatttcgtttttttttaaaggtcggtttttttatttttgtagtaggttttttgttttgttttgttttgttttgtttttgttttgtttttttgagatggagtttcgttttgtcgtttaggttgtag

SEQ ID NO: 195 - DNA, 1438 bp, Artificial Sequence
  chemically treated genomic DNA (Homo sapiens)
ttttttggttttgttattgtttaagttagtttacgttaagggtgttttttgttttttattttttttgttattttcgttttagtttcgttgtattttaagtttagtttgttttagtagtaggtttttttgataaatttgtaattttggggaaaagttagtttaagaaaggtagggggtttagatttatgttgtgtggtaaaagttttttttgatggggtaagggtaggattggaaaagtagagagatttttttggatgttttgggagagtagttttttgggtggtgggtggaggttggaggtagggaggaatttttttatagtgagaagggtttttaaatttaggcgagatagagggagggttaagaacgttaaggtaaatgttatttgtgttttgttttttttttaaagaaattaaataaagcggtcgcgttcggtggttttttaggaaggtcggttattttttgaggagatattaggttagtttaggttttattgttttcggtttttagttatggttgttattatttgattagcgttatagtcggtttttttgtaggcgtcgggagaagtgattagagtaatttttgttttttatagggcgggttttttaacggtgatttgtgggtagtgttttttgttgagcgagttatggttcgaaggtagaattaattgtgtttgtagtttttatttttaggatgtagtcgaggtgggtttaaggggttacgatgtggtttggagttttgttgatttttttgttttgtgagtgtttattttgtttttatattattttaattttatgagtatcgaagtttttggaattaatatgttttttatgttttttgtaggtttaagttttgagggttaagaaaattgtaagtttgatgtttttattgtaatagatgtttttatttggttttttttttttttttttgtgatgtttaaaacgtatattaaattgttggggtttgatatttttaataattaaggaaaagaatttaattgagaattaaagtttattttatgtgggtatttttagaaaggtttagatttaagttaagttttggttagtgtgttttagaagtagtatacgtttttttggttggtttgaaagtagtgggttattttgatgaattgtttagttagttatagattaaattttatgtttttttttttgtttttacgattatttttgattagtttaaaaatatattaggttgttgaaaagtaattgtggtttttgttattattttttaaaagatggtaaaaaatataattataagtagtatatatttttttttttttttttttttttttttgagatagagtttttgttatttaggttggagtgtagtggtgtaattcggttttttgtaaatttcgtttttagggtttaagggatttttttgttttagttttttgggtcgttggaattagagg

SEQ ID NO: 196 - DNA, 1438 bp, Artificial Sequence
  chemically treated genomic DNA (Homo sapiens)
tttttaattttagcgatttaggaggttgagataggagaattttttgaattttggaggcggagtttgtagagagtcggattgtattattgtattttagtttgggtaatagagattttgttttaaaaaaaaaaggaaaaaaaaaagaaaatgtgtgttatttataattgtgttttttgttattttttaaaaagtaatggtaaaaattataattattttttaataatttaatatatttttagattagttaagagtagtcgtgagaatagagaaaagaatatggagtttgatttgtaattgattaaataatttattaagataatttattatttttagattagttaaggaaacgtgtgttatttttaaaatatattgattagaatttggtttagatttaagtttttttaaaaatgtttatatgggataaattttagtttttaattggatttttttttttaattgttagaagtattaaattttagtaatttaatgtgcgttttaggtattatagaagagaaaggaggaagttaggtagaaatatttgttatagtggaaatattagatttatagtttttttgatttttaaggtttgaatttgtaagaaatataagaaatatgttgattttagaagtttcgatgtttatggagttaaagtgatgtggaaatagagtaaatatttatagagtagaagggttagtaggattttaagttatatcgtggttttttgggtttatttcggttgtattttgagagtgaagattgtaggtatagttagttttgttttcgggttatgattcgtttagtagaaggtattgtttataagttatcgttgagaaattcgttttgtgaaaagtagaaattgttttggttatttttttcggcgtttgtagagagatcggttgtggcgttggttaggtaatggtagttatggttggaaatcgggaataatggggtttgggttggtttgatatttttttaggaaatgatcggtttttttgaggggttatcgaacgcggtcgttttgtttagtttttttagggaaaaaataaggtataagtgatatttgttttggcgtttttgattttttttttgtttcgtttgggtttgggggttttttttattgtgaggggatttttttttgtttttagtttttatttattatttaaagggttgtttttttaggatatttagaaagatttttttgtttttttagttttatttttgttttattaaagagggtttttgttatatagtataagtttgggttttttgttttttttgggttgatttttttttaaaattgtaggtttgttaaagagatttgttgttggggtaggttgagtttggaatgtagcggaattgaggcgagaatagtagaggaagtagggggtaaagagtatttttggcgtaggttagtttaagtaatagtaaaattaaaaga

SEQ ID NO: 197 - DNA, 6826 bp, Artificial Sequence
  chemically treated genomic DNA (Homo sapiens)
atgtttgtaattttagtattttgggaggttgaggcgggtggatcgtttgagtttaggagtttaagataaatttggataatatggcgagattttgtttttattaaaaatataaaaaataaggtcgggtgtgggggtttatatttgtaattttagtattttgggaggttgaagtaggtggattatttaaggttaggagttggagattagtttgattaatatggtgaaatttcgtttttattaaaaatataaaaattatttaggtatttatgtttgtaattttagttattttagaggttgaggtaggagaatcgttagaattcgcgaggtaggtgttgaggtgagtcgaaatcgtgttattgtattttagtttgggtaataagagcgaaattttattttaaaaatagataaataaataaaataagttgggtatggtggtggtgtacgtttgtggttttagttattgaggaggttgaggtggaaggatgaggtagaaggatggttttgagtcgggagatggaggttgtaatgagttgagattgtattattgtattttagtttgggtgatatagtaagatattgatttaaaagagagagagagagagagaaagagaaagtagaagtagtttgaaaagatggggtggagagaacggaatgaaatgtagaaagaagggtttttgcggagattaggggttgagtgttgagattattaaggtgcgggttgtagattttgtttttgggttagagatagaagagattaagagttagaattatttaagatatgagaatttcgattttttttttttttttttagaggtaatagatattttgatagtttataataatgtttttattatgatattattgttttttttttatttacgaaaatgttaaggatttagtgaggttaagttatttgtttaaggttatatagggtagtttggaggagaatttaggttttgaggtttttcggttagcgttttcgtagttttggtagtaggggagtgggtaggtgttcgtagcgagggtattatagtgattgcgttgatgatagcgttattgattcgcgggcggtcggcgagtcgcggtagatttcggggtcggtttcggtagataggttgcggggttcgattttgcgggagcgtttaaggtattggtaatttggggtttaggttgtgtagttttgggttttcggtcgtttataggcgtcggcgaaaggttgtcgtttcggtcggggattaggaagcgttaggtagttggtaagggtttttcggggacgcgttatagttttatagtcggttcgagttttttgggaggtagggttggaagggtaggggtgaaggttagttgtggtcgtttgggaaggatcgtttcgtttgttttcgatttaagttagaatatttggatgatcggtgtttttaggacgtaggtgtaggtgagattcgttttgttatagtattttgtattttcgcggaggttttcgggagtttagcgtgtttgtttaaaacgaggaaagaatggttaaagttcgaatcgcgatttttaattttagcgggataggtgagggattttcgcgtagtttggggagggtattaggttaggtttcgtttttcgggggggtcgtttattttttcgggaggcgtggtttgcgggtcgtttagtttttagtgggcgagcggggaacgcgggtttcgtttttttttcgtttataagggcggtgcggtattgtagttagcgtagtttttattgagatttgttatttcgatttaacgtgagacgtatcgttcggatttattatggtgagtgcggttcggtcggggtcgcgtttgttttttaattgtttttgttttttgggggatattttttttaggtatgttcggggatttttatcgggcgtttcgggttttaggaggtgcgagggttttgtattttttttttttaatttttttttggtgattttggtcgagtcgtatagtttattttcggtggttggggttggggtttggggtggagtgcgattttttagtaatagagaggaattttttttggtattttgtttttgttttacgagtatttgtgtttcgattttgtatgagagttacgcgggttcgcgtttcgtttttttcgcgggtaaaagaagacgggtttggttgtttttttatatttttagtttttggtttttagtattgatcgagtacgtgtttggcgttagaaggtggaaggggttaggttatttggtgtcgtattttttttttttttgtgtatgtattttaattatttatagaattatttttttttcgtgatttagtatttcgcgtttgagttgagagggttggtgggaacggggttcggttttttgaagcgagttggttttttttagtcgaagttcgggtgcgcggatgggtagagatagttggcgttgagtattgcgcgggtcgaggttaggttggggggaggggagagaggtgtatgtagggggtggtatttatagtttaggagcgggggtcgaaatttaattttcgttttgggttgggaaataattgtaaagattttagagggagagcggatgtagggttgggttgtaggatggcgtttattttgttcgggataaggcgggttatttttggggttttatcgtagttttattttttttttcgggtatttggaaatcgttatttcgttatttcggtgtgggaagagcgcgcgggttttgtcggattttagtgttttaggggttaatttcgggttgatagggacggagtttaaggtagtgagcgttttagtatttttaaattttattgttggtttttgttgtttgagtttataagtattatcgtcgttattttcgtgcgggttgatacgggagatgaaagtggtgaagatatttagggtgcgggggtggaggtggggagaggagttagatgggattgatttttagagttagatgggatttaaaggtgagggaggagggtattttgatggcgtgtggttagttgatgttagattggatggttgagatatttttgtagtttataggaaagatagagggaaagggttttatgaattttagttgtttatatttaaagtaaataattaattaagtggggggggggtttttagttgtaaatttatatttttaggaaattttttgttatgtggagttatagtgtttatttgatagattttttattgagaagtgggttaagaggttggtttgtattgttgggtgtttttaggtggggagttttgtatttgggagttcgggtaggttgttattttttttttatttttgtttagttttaattttttatttttgttaattgagttattttagttggtagatgatagggtggaagagagattcgtaaggtgaggatttgtggatgtggggtttatgttgtgttttttttttttattttttagcgtgaatgtattttagtttacgtggggtaggtaggtgtttagatgggtaatgtttgttgggagttttattgtttggaatatgggatttagtttgatgggtagatgtttagtgataagattattggtggaggggacgatttttttattatttttttttgtgaaattggtgttggaaaatacgtatttcgggtagtttttgtggatttggagtttacggttattggtgagaggaagtggggataaaattgaagggggtggagtatgatttaaagtttttttttggagagagagggtatttagattaggtatttttagttttgaaaatttttagtcgtatttgaagttgtagaaggtaagttgatttgagattggtttgggtagttggtttgggttttttttatattttggtattttaggttggtaggaggatgagtttttttatgtatttggttatagttattattttgggggaggaaggtttttgttgagtatagttttgtggtttttgtttttttagatgagattcgaaatggtttatatcgatagtttttttatttagagtagtttattattgggaaagaggatgttgttaataattatgttcgtggttattatattattggtaaggagattattgatttagtgttggatcggattcgtaagttggtgagagtgtgttttgggagggagggaatttttgagattgtgttaatggttaggaatatttttttttagatttttttaggaggttatttttaattatatatggtttcgagtgtggtgttgttatggtatttttagtatttgttttgattgttgatgtattttacgttttatggagttaggtgatagagttttttaggttttttttttatttaaattgttttttttcgtttttgttttttagtttgattagtgtataggattttagggttttttggtgttttatagttttggtgggggtattggttttggttttattttatttttgatggagcggttttttgttgattatggtaagaaatttaagttggaattttttatttatttagttttttaggtgtttatagtcgtggtcgagttttataattttattttgattatttatattattttggagtatttagattgtgtttttatggtggataacgaagtaatttatgatatttgtcgtcgtaatttagatatcgagcgtttaatttatattaattttaatcgttttattagttaaattgttttttttattatagtttttttgcgttttgacggggtttttaatgtggatttgatagagttttagattaatttggtgttttattttcgtatttatttttttttggttatttatgtattagttatttttgtagaaaaggtatattacgagtagttgtcggtggtagagattattaatgtttgttttgagtttgttaattagatggtaaagtgtgattttcggtacggtaagtatatggtttgttgtttgttgtatcgtggagatgtggtgtttaaggatgttaacgttgttattgtcgttattaagattaagcgtagtatttagtttgtggattggtgttttataggttttaaggttggtattaattattagttttttattgtggtgtttgggggtgatttggttaaggtgtagcgtgtcgtgtgtatgttgagtaatacgatcgttatcgtcgaggtttgggttcgtttggattataagttcgatttgatgtatgttaagagggcgtttgtgtattggtatgtgggtgagggtatggaggagggtgagtttttcgaggttcgtgaggatatggttgttttggagaaggattatgaggaggtgggtatcgatttttatgaggacgaggatgagggagaagaataaagtagttgtttggagtttatttattatgtttattgtaaaattttttcgaaataaatagtttttttgtacggttttttgttttttttgagtgtttgagtttttgttgtttttttttttatgttgttgttgttttgtttgttgtttatgatttttattttttttatcgttgaaggtgagatttgtaaaggggtttttgttaggtttaggaagtataattttagggattttaaattgaagttttagggttatttagtatagggaggaaatgaggattaaaatttaggtataaattgttgaaggatgagtttttagtttttttttaagtaggagtataatttagtggtttttgtttttgaaagttagattgttattttgttttttttgttgtttttatatttattaattttggaagtaaggtttggtttaggtttttttgtgtattatgagggtttgggagtggggttgggttggtttagagtttttgggtatggagttacgttataagtttgggggatgggagggaatataggcgattttttagagttgtttgtgttattgtatttttgagttagttttgtatagttttttgttttgttgttttgttggagttggggttgtgttattaaaagttaggttattttttttttgtttgtgatttttttttggttttagtttttgtgttagttagtgggagatttttgttagggttttggggaaagttttaattttgttaataggagttttaggttttatgttgatgttatattgtggggtagatatggttcgggggaggaggtttggattataaaagagtaggagatgttaattttgtttttgttttttttttttggtgatttagggaatagagtttttttttagggaataggtttgaagtttagttaagatagggtttttgtttatttagtagagtaggtaggaagtggtagttggatattgttatattatattgttttattaattattaattatgtatgagtttgaacgattagggagatataggttaaaatagttgtcgttgttatttttatttttttcgtttttaggttgaggatgggagatttgtaatttatttgttttaaagtttttttaggtgtttttatttagaggtttttgtttagtaaatcggttaggtagttttgattaagttatttattttaggagtgaaggaaggaaagaattagttgagtgtttttagggggttttagtttttgatataggtagatgttagtttgagtttaagtagttttaagttttgatttaagataagttagaattgtttattgttaattaattttttgtagaatgaagttatattattgtcgattttgtattattttttttttttaggtagttcgtttgaaatggtaatttgattttgggttttttgtatttttttttttattttaggaatattgagattaagatttatattaatttgtttttattttatttttgtttatatatttttttgtttttagatttggagttagaatattatgtgagttt

SEQ ID NO: 198 - DNA, 6826 bp, Artificial Sequence
  chemically treated genomic DNA (Homo sapiens)
gagtttatatagtgttttgattttaaatttgggagtaggagaatgtgtaaataagaataaagtggaagtaggttggtgtagattttagttttagtgtttttggagtgagagaagaggtgtaaggggtttaaagttaggttgttattttaggcgaattgtttgggaaggaggaatggtgtagagtcggtaatggtgtgattttattttataggaggttggttagtagtggatagttttagtttgttttagattaaaatttaaagttgtttgggtttaagttggtatttgtttgtgttaagaattagggttttttaaaaatatttaattagtttttttttttttttatttttggggtgagtagtttagttaaagttgtttagtcggtttgttaggtaagggtttttgggtggagatatttgaggaagttttgagataggtagattataggttttttatttttagtttaggggcgaggggagtggaggtggtagcggtagttgttttggtttgtgtttttttgatcgtttaagtttatatatggttaatgattaatgaggtagtgtggtgtggtagtatttagttgttattttttgtttattttgttgagtaaataggggttttgttttagttgggttttaaatttgttttttagggaagggttttgttttttgaattattagggaggaaaggtaagggtagggttggtattttttgtttttttgtgatttaagttttttttttcgaattatgtttattttatagtatgatattagtatggggtttggggtttttgttagtaaagttgaagttttttttagggttttagtaggagttttttattagttagtatagaggttgaggttagaaagaaattataaatagaggggagatgatttgatttttaatggtatagttttagttttagtaaagtagtaagataggaagttatgtaaagttggtttagaggtgtagtggtataaataattttaggagatcgtttgtgtttttttttattttttaagtttatgacgtggttttatgtttaggaattttgggttagtttagttttatttttaaatttttataatgtatagaggagtttgggttaagttttgtttttagagttggtaaatgtagaggtagtaggaagaatagggtagtagtttaatttttaaagatagaaattattggattatatttttatttggaaaggagttgaagatttattttttaatagtttgtgtttggattttggtttttattttttttttatattgagtaattttaggattttaatttaaagtttttggggttatgttttttgggtttggtaagaatttttttgtaggttttatttttagcgatggaagggataagggttatgaatagtaaatagagtagtagtagtatgaaggggaaggtagtagaagtttaagtatttagagggaataagaaatcgtgtaaggaaattgtttatttcgaaaggattttgtaataaatatagtgaataggttttaggtagttgttttattttttttttttattttcgtttttataggagtcgatgtttatttttttataatttttttttagggtagttatatttttacgggtttcggagaatttatttttttttatgtttttatttatatattagtgtataaacgtttttttggtatatattaggtcgaatttgtggtttaggcgggtttaggtttcggcgatggcggtcgtgttgtttagtatgtatacggtacgttgtattttggttaggttatttttaggtattatagtgggaggttggtagttgatattaattttgaagtttgtggggtattagtttataaattgaatgttgcgtttggttttgatggcggtaatggtagcgttgatatttttgggtattatatttttacggtatagtaggtagtaggttatgtatttgtcgtgtcggggattatattttattatttggttggtaggtttaaagtaggtattggtgatttttgttatcgatagttgttcgtggtatgttttttttgtagagatgattggtgtataggtggttagggggaagtggatgcgagggtagggtattaggttggtttggaattttgttaggtttatattgagggtttcgttaaagcgtagagaagttgtgatggaggagataatttggttaatgaggcgattgaggttggtgtaggttgggcgttcgatgtttaggttgcggcggtagatgttatagattgtttcgttgtttattatgaaggtatagtttgagtgttttagggtggtgtgggtggttaggatagagttgtagggttcgattacggttgtagatatttggggggttgggtagatggagaattttagtttggattttttgttatagttaatagagagtcgttttattaggagtgaggtgaagttagagttagtgtttttattaaagttgtggaatattaggaagttttgaagttttgtgtattggttagattgaaaggtaagaacgagaaagaatagtttaggtaggggaggggtttgagggattttattatttggttttataaagcgtaagatatattagtagttagggtaaatattgaggatgttatagtagtattatattcgagattatgtatagttagagatgattttttgaaaggatttgaaaaaaaatatttttgattattagtatagttttaaaagtttttttttttttaagatatatttttattagtttgcggattcgatttagtattgggttaatgatttttttgttaatggtatagtgattacgggtatagttgttggtagtatttttttttttagtgatgagttgttttgggtggaagagttgtcggtatgggttatttcggattttatttggaagggtaaaaattataaagttatgtttagtagggattttttttttttagggtggtagttgtggttagatgtatggaaggatttatttttttgttagtttgagatattagagtgtgagagaaatttagattagttgtttaggttagttttagattagtttgttttttgtagttttaagtacggttaggaatttttagggttaggaatgtttggtttaaatattttttttttttagggagaagttttgagttatgttttattttttttaattttgtttttatttttttttattaatgatcgtaggttttagatttataaaaattgttcggggtacgtgttttttagtattagttttatagaagaaggtggtgaaggagtcgttttttttattaatggttttgttattgggtatttgtttattaggttgaattttatgttttaagtaatagagtttttagtaggtattgtttatttggatatttgtttgttttacgtggattgagatgtatttacgttgagggatagagagaggggatatagtatgagttttatatttataagtttttattttgcgagttttttttttattttattatttattagttaggatgatttagttggtaagagtggagggttggggttgggtagaggtgagaagagagtagtagtttgttcgggtttttaggtataggattttttatttggaggtatttagtaatgtaggttaattttttagtttattttttagtggggaatttgttaagtgagtattgtggttttatatgataaaaggttttttagaggtatgggtttatagttagaggttttttttttatttgattaattatttgttttgagtatgaatagttagaatttatagaattttttttttttgttttttttgtaagttgtagaggtgttttagttatttaatttggtattaattgattatacgttattaggatgttttttttttttatttttaaattttatttggttttggggattaattttatttggtttttttttttatttttattttcgtattttgggtgtttttattatttttatttttcgtgttagttcgtacggaaatagcggcggtaatgtttgtaagtttagatagtaggggttagtaataaggtttgagggtattggggcgtttattgttttaggtttcgtttttgttagttcgaaattaatttttaaagtattaaagttcggtagggttcgcgcgttttttttatatcgaaatggcggggtgacggtttttaaatattcgagaaaggaagtggaattgcggtgaggttttagaggtgattcgttttgtttcgggtaggatgggcgttattttgtagtttagttttatattcgttttttttttggagtttttatagttattttttagtttaaagcggggattgggtttcggttttcgtttttgggttataaatattattttttatatgtattttttttttttttttttaatttggtttcggttcgcgtagtgtttagcgttagttgtttttgtttattcgcgtattcgggtttcggttggagagggttagttcgttttaggaggtcgaatttcgtttttattaatttttttagtttagacgcggggtgttgagttacggggggggggtggttttgtggatagttggaatgtatatatagaggaaagggggatgcggtattaggtaatttgattttttttattttttagcgttaagtacgtgttcggttagtgttgaggattagggattggggatgtaagagggtagttaaattcgtttttttttgttcgcggaaaggacggggcgcgggttcgcgtgatttttatatagagtcgggatataaatgttcgtaaggtaggagtagagtgttaggaagggtttttttttgttattgaagagtcgtattttattttaagttttaattttagttatcgaaggtgaattatacggttcggttaaagttattaggagggggttggggagggaggatgtaaaattttcgtattttttgagattcggaacgttcggtggaggttttcgagtatgtttggaagaagtgttttttaaaggataggggtaattaggggataggcgcgatttcggtcgggtcgtatttattatggtgagttcgggcggtgcgttttacgttgagtcggggtgataggttttagtgagaattgcgttagttgtagtgtcgtatcgtttttataggcggggggggggcggggttcgcgtttttcgttcgtttattagaggttgggcggttcgtaggttacgtttttcgggagggtaagcggttttttcgaggggcggagtttggtttggtattttttttaagttgcgcgggggttttttatttgtttcgttgggattaagagtcgcgattcgggttttaattatttttttttcgttttgagtagatacgttgggttttcgagggttttcgcggagatgtagggtgttgtggtagggcgagttttatttgtatttgcgttttggaggtatcggttatttaggtgttttgatttaggtcgggagtaggcgaggcggttttttttaagcggttatagttggtttttatttttgtttttttagttttgttttttaggagattcgggtcggttgtgaggttgtggcgcgttttcggggagtttttgttagttgtttgacgttttttggttttcggtcggggcggtagtttttcgtcgacgtttgtgggcggtcgaggatttagaattgtatagtttgagttttagattgttaatgttttaggcgttttcgtagagtcgagtttcgtagtttgtttgtcggggtcgatttcggaatttgtcgcggttcgtcggtcgttcgcgggttagtggcgttgttattagcgtagttattatgatgttttcgttgcgggtatttgtttatttttttgttgttagaattgcgggagcgttgatcgggggattttaggatttggatttttttttaggttattttgtgtgattttgagtaagtgatttaattttattgagtttttgatattttcgtgggtgaaaaggagatagtgatgttatagtggaaatattgttgtaagttattaaaatgtttgttgtttttgaagagaaaagaagaaaatcgagatttttatattttggatgattttgatttttggttttttttgtttttaatttaagagtaggatttgtaattcgtattttaatggttttagtatttagtttttggttttcgtagaagtttttttttttatattttatttcgttttttttattttatttttttaagttatttttgtttttttttttttttttttttttttttttttgagttagtgttttgttgtgttatttaggttagagtgtagtggtgtaattttagtttattgtaatttttatttttcggtttaaggttatttttttattttatttttttattttagtttttttagtagttgagattataggcgtgtattattattatgtttagtttattttatttatttatttatttttgagatggagtttcgtttttgttgtttaggttggagtgtaatggtacgatttcggtttattttaatatttgtttcgcgggttttagcgatttttttgttttagtttttggagtagttgggattataggtatggatgtttggatgatttttgtatttttagtagagacggggttttattatgttggttaggttggtttttaatttttgattttagatgatttatttgttttagttttttaaagtgttgggattataggtgtgagtttttatattcggttttattttttgtatttttagtagagataaggtttcgttatattgtttagatttgttttgaatttttgagtttaagcgatttattcgttttaattttttaaagtgttgggattataggtat

SEQ ID NO: 199 - DNA, 20 bp, Artificial Sequence
  CD22 primer
tgtgtgttgttaaatgaaga

SEQ ID NO: 200 - DNA, 20 bp, Artificial Sequence
  C22 primer
acacaaatattaaaattatc

SEQ ID NO: 201 - DNA, 18 bp, Artificial Sequence
  CD22 detection oligo
ttgttatacgttttgttt

SEQ ID NO: 202 - DNA, 18 bp, Artificial Sequence
  CD22 detection oligo
ttgttatatgttttgttt
